United States Patent Application Publication US 2025/0179532 A1 - sequence listing, part 3

SEQ ID NO: 13 - DNA, 3042528 bp, Cricetulus griseus (residues 1,521,265-3,042,528 of 3,042,528)
  source 1..3042528: mol_type = other DNA; note = MTMR2 Contig Sequence
  misc_difference 1..3042528: note = N can be a, c, g, or t
tgagtttttccagctctgttgtgttgtgatatttgacggaagcctaccctatcactttgtgttctcattttcacaattccctgctgtttacttgaaaactccactcatagaactgtcatcccactccaagaaatcacgaatggagctaaagggaaatggcagatctagtagctcagttctccaagtcataaataagaagatgactctcccaaaggtagtttttttaatacagaagccagaccaaaccttgactccaagtatttgtcgtttgcatttcagtgcacttcctgcaagaatgtcaacaaaagaacaaccaaaccaatgaagactttcctcaaactgtcatctccagcaaagtcagtttcagatgtacatacttgttcattttaattgtgacacaatatagacatacattaactaacatgtattcatatgtaacattataatgtatagcattcacacatattagtatatttcatataaaattttatatttagtagactttttacagtcacacatattttacttgttattgacatgttttgtagagttgccatcatctgtatctccctgcaataagtagttcattttctccaaaagatatttttatggaagaccttttagaatttattccctgaattaaaaaaacatagagcaattaataattaagtatggtacaacattgcaaagggttcacctatttacttattctttcattcaacatatttttaggtggcaggtaacctgccattattggtagatattacagaaataacagaaaattgtatggctagcaaggatccttgtaggagatttaaacattaaattaaattaaatttaaacaataaggaaggtcccagtggaatgctaaggtttttaagatatgacaactttaatgaagattaattaccatctgcaaagatatgcagcaagatctggtcatgtcatggagctcagagaagcttaccctgcctgttcagtttatttgacatcttaatgatgagtataatgggtacactgaggcattagtggaacagggagtagacagtgaattcccggaatgagacttaaagaagaaatggcaccaagtggtgtagaggacaacctaatcacgcctgcttgggcgtggtcaggcacacctgtagccagctccaagtaggcatggttagggcgtcccctacaacatattgataattcaccttttaaggctggaaacaagaagcagtggagcttcacctgaacaagacagatgctgtctgacaacactaacatgagtaagtaccatggcctgaggccacataagggatatgaagagatgtattttctttgtcctaatacaaagggggagtcctacaagccttttgaggtgataacttaatgaaaacctttccattgtgaaaacatatttcagatgaagtacagacagcaaataggagcagagcctctatagtatatagccattacttgaaaagattgtaagagtgggactgataaattgagcaaggagcaacgaagagaccctgtctcaaacaagaaagataaaggataggtgaatgcctgggttttctcaaacctccacacatgccatgggatacaagtggtttcactcaagcacatgatcacagagatttcaaaaggaatgagtcatctcacttgtgagaaacagcaaaggagggtttgaatggaatgtgatggtatttagacttaggtaaataagagcatgtcattttactttaggcaatgttaaaagtatcaaaagtatctctcttcatgtgaggtgtggtttcagtgccagaataaattatgttagaccttaattttaaaacaatctattgtcaaatgattaaggtatgggaatcttgtttttctggttgtctcaatagggggagacttttctgtgggtagagactacacatggagaagaaggaaatgcattgtgagatgtctcagattggctgtgacaaaagtaggactaaagaagtaggcaattaatacataattatacacaacttgtcacattggtatatggaccaagaactctttcctctgtcataaatgcatttccatttatcattactagaaggaacagctgtttgaacttctcaaaggcacaagttattcttagaagtttcatgttttgaaggaagcatttacattcagccagtcttagactaactatgtctccttgctttccattccaatcttattagacaaaaggtttgagaaggtcaaacagggtggtgtgggttggaaactcacacaagagacccttaagggagaatcattaacactcttgtaaaggtcaaatggattcttatattttttacttagttttgatttttgagctagaataaaatgagataaaatagtaaaagaccaaagtaaaagtaaagagctggcagttgagcagggaagggagaaagacagggtgtgagtgtgaacccagaaaataactatgcaaaatcctggttagggaagaggatttacaaaaggaagtccttcagaggaaataaataaaattactacctatctgtgccaaatattcaaacaatatgattaaacaaaccactgggcttaagagaaaattgtaaataacacagatatatagcagtaatgcaatgtttgtagaaatttacaaagtcaaaatttcatcaagccaaaggctgggtgtagctcagtaggtagagtgctcatctaacaggtacaaagatcttgattcaattcccagcaccatataactgatgtgggcaggagcacacctgtagtcacagcacatgagaggcgaaggcaggtggttcagatcaaagtcatctttagctatacatagtaagtgagaagaaagcacaggacacatgaggacctatctcaaaggataaatcatttaacaatatagccgaaattctagtctcagtgctatgtcatcagcatggtccatggtgcctatgggtacaggcgcagctgtcactggacctatggccacccccttttatcttgttaggttatagcgatttgctgcccagatgacaccttttaaataatgacaaaattactttctcacagaacctgaggaaggtgtacactcagtctctgctctcccccatcacatggtctctgaacagcctcttttggtaaactttcaatcaaagggtacaacttttccaacaagaaagaatgttgcatggcattaaaatgtaatgttgcatttataaaattcacagtatagtatagaaacacaatcagtttatgaaggttgaaaacatatttcctttaactccccaacatcacactgaaaaactgtcatcattacattgtttacaaatggaggacagagctggagggttaagtaaaagtggtgtaagttatacagaaagggactggccagcttctattgtgatgcttgactccaggaagaagttagaaaagaaaatgaggtttacagaggttctgcacatgaacagaagttcacacaacaggcgggattcagagaatgcaagccatgcaattatgcaaaaatggcagaggataaatgagtattttatccattattttttttccaagtttccaagaatagcaaattctctgatccatatttctaactgacaaaaattaacagctttagttttaactggaagcattttcctccatatactctgtgaaagtatcatttccaaacatggcatgaaggtctcagatcttgaaatgtgaacacataagcactgtctccttgcatgataaataaaatagttgctctcatatggctatcccagggactgtaaaatgaaatacaaattcatatatcctctacttactaatttataaggcagatattgaatatttaatacttttatgaattaatggaaaagctataatgccaagaaaatggatgggctgtgcttgaacaacttttcaagtacccatctccttcacagcatctatttgtaagggatacagcagatgaggaccagaattttaagaggatgtgcattttcatcagatcctgccagaaaaacatgtaccacatacccaagatgcccagggtggcagtgagatgttgggttagtgggcaaggaatcagggcaaagaggtgaggctgtcttaaaggctaatgtcatgtgattctatgcttaaaattagttcaaatataaagcatagatgcctttcacaaatctagttagaatgtctcttctcatttcctttctaatttagccatctggattaagaaaacatctgtccattcatgaaaagtacctgtctcatatgaacaagcaaacaaccttgtatgaaattgtggagggtaagtgcagaatagaaaacagatgttcagtacccatctccataaagacctacatttaccccaaagctggaagcctgctgccacgtatttcactttgtgcctcatatctgtaactgtgtgcctgcggcttccccctctagaccacagatttatttgccatgtttgaatctctaaagattcctctctggtgattcattcccccccacacacatcccagccctgcagaaaactaaatctccttcacttgctactggagagggttttttttttttttttccataatcatcaataacacccactgcagagattcctgctttcagctgcatgggcagatgctggtactccctgagtctaacttgctaattgaatagagctataaattatctatgagtcacagacaccctgctgaaaaagtaaatggcatgcctgacttagtgcccttgtggtcttacttttctatattttacatgttactttttagcaagatatcatattgctgctgctctgggtttttcttgacttctcttgctccaaggttttgttgttgttgttgttgttgttgttgttgttgtttatttctcttggatttgaaaatggtgttataaagtgcaaacttctgttcaggattttttatttacaaaattactgctatagaatatacttgagcattgcaaaccctcctaaagtgatgtgtattgtctgtttcagttctttcttcattcggtttttgctgacaatttcttacagtgtgtggaaaaaagcttgctttcatggacactcaactaaaccttgcacaatgttgtcaattgtgctttcatgttctgagattattaaataaatatcagtcttgtttgaaattcaaggaaaccatctgcaaattcttcacatggggaaactgagatatagaggctgacttaaattacagtctcaagattttatagggttaaactgaaattcatggttttaagcaggcatattttcttcagttcttgtctttaaattcattacctacaataattagaggaaagattgttaaaaaataaactggggaaaaatgtcttcatcaaacttactttgtctgcacccaaactccaatcaaaattctatgttgtggatttgattacagaaattagatatctttaaaaattgtctactctttacagtttgaataaaatagtagcttatatagagaaaaaattggttatttaaccataaaatcagattgacatattataaagatctgagaacaaagccagagaaatgcatgaaatgctgtggacaaaagtgagctgaggtcacaggtaggaaggtaacaatgtgatcaactgccatgaatttaagttagattatattcctacgagtttctggagtgtattgggtgtacaaagtatgataagaaggttagggtgcatagagaaaattttcaggacctgaggacagatacaataatacctcttgaactatagatgcaaattcctagatatattatgatggttaatagtgactgttatttgatgggatttgaaatcaccatagaaacagtcatgttacaaatcagtgagggagtttctagatggggttaactgaagtgaaaagtcccactctgaatggggtcagcaccatcccactgccttatgtcttagacggaacacagggagaaagtgagagaagcttcagcataaatctctcttgctctaggactgtggacatgatgtacccaactgcttgactttcctgctgccatgacttctttgccatggggaattatgagttgaaaaatagcatttcttcttcccttaaattacaattcccaggaattttgtcataggaatgagaatactagctaataaatatagattgattctagaaacaatatgtgggatccagtgagttgctggtgattgtctcaatccaatctgcctagtcaaagctgagacttcagagtaatagtccaagatgctcccaagccaataaaatatgggccactgatcatagtgacttgttgcttataaaagccagaaaagtctacaataaagctgagcaagagttatgctatcttcagtagtgttctctaagtagatgtcatcaacaccaagttagacagagttaggaagtactaaaggttgtctgtgcaatagtgtgtaagccagagcaggaaaacctgctgacggagaccctgatgtgccctccactgggtaggaaataacttacagtgacacatcacaactgttacaataaatctttccgtagagggagaggccatcaggtggctggggactttcggtttccttttcggcttgctgtacagactgctgccatgccagctggctaggttgctctgtaagtaaggcttttccctattaaatacccttatatttctacttggctctgtattggtaatttcccactttataccacctcacaggaagctcaggtgtaaagactgtcaatagatggcttctttattagttcacagtgaccaaaccccatacaaagccaacactgtcctcatcaactaaggcaaatgagcaagagcctggcttcaactcacatgctcctctgggttctaaaggccttgggactgagacagctgaccacatgttcctttagcacagatggatagttgtctttttaaggtggttactggtggagaaatcacattctgtgcctgagtgtgtatgtgtgtgtgtgagtgtgtgtgtgtgtgtttctttgtgggcctacagaccaagttcaggatattttactttacacctggaataaacagatatgagtaaatacacaggtcgggaatcaaaacagtggcgagaatgggtaaataattactagtcacatcagaacaaagacaaaattgagaatccaatacctacatttcacagagacattttagatacaagtttagtggctgggcccccagcagcctgcacccacagcagcctgcctttaatgacttggcttcaacagcacagcttgtcagttttgttttaagataaatgccatcctgatatctatgacaagtcactgactctgtgccatacagacttaaacttctggaataaaattgacataaattgaaaaaaaactataaagaggtgtcagtgtactaagatataggaaggcagaggcagggctgtggagatgtttgagcacacacaatgaaagagtagagaccagagtccagcgtcctagcaaccatgcaaatgcttggtgggcatagtggcccacctctcctctcagcacttgatagctgaagaagtggctagtcatctgaagcaaagtgactagttagagtaaaagaattagtaagtcttgagttccacagtgtctcaacatgctagatacatcaatgccaatctctggcctacacaaacaattcactcatatgcacacatatctatattcttaaatatcctctcacacatgcaaaatgcatacatacatagatacataacatgcatgaaatatgaatggaaaattaaaggatggagcagtgcaatgccatgttttaactgaggacaagcaatcaagatttgagatcactttgagtgtttcccctactgagttctaaatcttagaattttgataagttacaattccttgaaaaactgaaggaaaattggaccttcactgctggaacaggaactagaaacattccactgttaacatccaacaatatggtgaggtttctagactctgctactgcaacttgcagaaagcctcttcattgctctgcacacaattatttctttataagaactgaacagctgcagaactgagaacagttttagtagggctgtcactgaacacctaagactgcagtgtagagccacattacaaagctgaaaattacatctcatgagattaataggcagaaataattgatgtcattctttatgctccaagtgttttacgcagttcacctcattaccgctcctggcgttcctgtattgtaagttggagggcaggttttctacctcatactcattactagaatagtggaatgagcagggagagggagtggctgtatcagagctcttgtgtaattcaggagtatggctacagagagggagtttatggcgccagatagaaacaggtctagcactgttcctaaaaatctttaaaacatgaggtattagtgggcaggtagcaccaagatacaatatatctaggctcacaattctcaagtacaaattaccagaaaacacaaccataggcaaactcatgtcagaaatgtgctattagtgcaaagctcctctgagaacaaacttccataagcttctctgaaagctgggatatgactcaagggtagggcctatgatactttatcttgattgacagtgtgttcagaaattagaattaccatggagtcagactcctgtgtttgtctccgaatatttataacagagtttatcagaaggatgacagaagactcatcccaaatgtgggcagaaatctggagcccagattaaataaaaaggtgaagacaacttggagccgcagcattcatttttcttcttcctcatccagatacacggtgcctacctatctcagagatctgccactttcatggcaagcaccttctccctggacttctttgtttttttactaatgcagttccaaccaacataaaccaatgaaatccgtctctcctccaaggcagaaggctgcaaataagtaattgctgagtactcatccccaagagacaactctgtcaccctacctccagctctgagagtatcaggcaccatgggccaaagatatttaagacctggtgccagggagagtcaaaggaacattggccaacaggcatgatgtcactgttacacatttaaaaactctcagtagctgttatgacctgtcccaggcctgtatcagatatcagcatggaccatctacaattcaccatggggtgggaaggatttcacatgcctccagctctctcaggatttgtacagttaattgtttctggaggagtgagagagactgtctgcagttgtatagccacaggtaacatgttcatgctcctgttagtaaccagaattaaacacattgcttcaccactaacaacattaacaacaaagaaagaatatgaaagttgaagcagaacactatttggagagagggaagaagacagtaggaggggagacagtagtggctctgtgatcatagtgcatcatatacttgtatgaacataccataataaaaccattgctgtatttaattaatatgccctaataaaaactcaaaaattatcatccaattaaatgtttagccatataagcagatctggcagaagagttgcccttagtcagtcatgtgtgattcagttattagggttacattttcctttcaaatgagaagttaacagaggttaaaaggaagaaaggaacaaaagcgaaacaaggagtagagaagacctggattttcattgagactttgaacctgatattctctgtgcccattttccccacagtatttagtgaatttattttggagtcttaactggttctaatgatgttaattagtgaaaatcatatactgacctgctaatgataccttatatttttataaagatacacattctgaagtcatctgcctggcctggcagcacagtgaagaacttattcataggccaattcaaatacagctattttggagtttagtaatcgaaagcactctcaaagcccagagcaaaatggagagtgttttctgttacagattgctttgtgacacattgcttttatcccacagatgctatttaaagtgacagaatcatatgaggtgattaatgaaggaaaaggcacagagcagagatagaacaaagcaaaacaatttaaaatgggtagatactcgtccttcatccaaagataggtctccagaactgaatgtcagcaacatagccaaactgagtgagataatgcaaaatactatgctatttatgataaaaagtgggcaattggtatgctttatcacaaaataataggaagtaagaaagataaataaatgttagttcccaaattttcatgtctatattctgaggtgatgcacaattgtttaatgcttttttccgtgtgtgctgaagaccatattagctacaaagataccaaaaccctttctggaaattatgtgatagaaagagaaaaataaaacttctgcctcatgattgtcaggcatacctggtcttggccccttgaaattaaaaaacaactatatatgtatatgaatatacataatcaactggcttgtaccccccccacatacatacatacatacgcacatgcaagctgaacacactgaaaactaactgttgtaagatccttctgagaactgaagtcttagagcaaactgctgcccataaaactggaaacaggaagacacaggagaacaaaattcagttggagcatgaggacatacacttgcttcaggagcattcaggcagacaagattgaaagattaaaatccaaccataatgatatcatcatcatcatcatcatcatcatcatcatcatcatcatcatcatcatcatcgtcatttgagacagggtttctctgtggctttggaggctgtagaccaggctggctagaaacctctggaaccaagaaaaggcaaaagaagtgaagtcaccaactccatgcctcccctgccagccacccagtgagtgttccagaaaaagcctttcctgctacattttgaccttagcttagtgatgctggtttttcatatctgggttttagaatttaagaaaataaactgtggccgggcgttggtggtgcatgcctttaatcccagcactcgggaggcagaggcaggcggatctctgtgagttcaaggccagtcttgtctcaagagcaagtgccagggctacacagagaaaccctgtctggaaaaaccaaaaaaaaaaaaaaaaaaaaagaaaaagaaagaaagtaaactgtgatgtggcatgaacattcttaggctttctttactgtttctcttccattccctcctgcttatgttcacactccctctccctcccttttgcatttcttcatctaacttctgttaatctcctttcctttgtaactgttaagtgaaggtggcatgctgatgacttctgtatccctggcaaacaccatgcaatttccttttggaattacttctcttctccctttggactaaatgacatttaagaattacttttttcctttgggtttttttgagacagggtttctctgtgaagctttgtaacctatcctggcacttgctctgcagaccaggctgaccttgaactcacagaaacccacctgcctctgcttcctgagtgctgggattaaaggcatgtgccactaccacctggctaaaaattacagtattttaaaacattgcaagcaaaaacaaacaaacctatttgtcacttgtgacacactacacattctcccccatgttattaatgtcaacatttctcaattattcaatccaaaagtcttgtcatcttctctgaactcattctctcacatccctcatccatcccattagctgtgtcatcaactcttcctcttgcttttatatgattccttccttgacttctctacactttaatgcctttcctcattctgcagcccaggtgactgcaatagctgaagccaccacatggctgttgccacacatgagtgtcctcacagtgatggacatacctcacctatctggtctcccctctggttttcagggggaagctatgtgtacaaatttctttatatcatttacagtaaacaagtcctccaacttcttatttaacaaagggactacagaaggatatgctgcctatggggtctgaagagagggctcagtgtttaaaagcattggctgttcttccagaatgcctattctagattcccagcaaccacctgggtgcttacagctgtctgcaatttcaattccagaaaatctgctcctttttctgactcccatgggcactaagcatgtgtgtagtacacatactacgagcaggaataacactcaaatgcatatacaaaataaaataaaataaaataggattgtactgctgagattatatctttgttcataggtgtattgcacactctcttaccttcaccagtcttagttcaaatacccattttctcagtgaggtcttttattatttcttaataacttgtaatatcactctgtctactttttccaatggctcttatcaatgttgcacatgttctttatttacatctgtattactattcccaaggatataagcatcactgggctacaggtttatctattctacttactgttaaatcttgggtgtaagaacagctatgaatttgttacctaaatttagtcatatttaaatatatgcactttctctgcaaaacagttaggtcactaacataatggacgtatgatcagagtgggacccttatagagaaatttcatattttgcagtaactatatttcattcttttaaaaaatctactattcactttttactcaagtagtatccattcactgttcactttgaacaaagtcctctgggaggcatcagcagccacacatggaagaacaaggctcaatttagaaatttaagtattattcttgaaacagaaatgaagaaaaacacaaaattaaaatgacatgaaagactgaggccaggaccacaatggaaacaaaggtgtaaagcattatagaggattattttactcactcattgaactattgaaaaagtagcactgggtattcttcctctataagtgaagaaccaatcaggaaattcagggttacaatagctgcccattccttcccagggcctctcacaagcaaagtgttggctatggttagcaccggggatatttttggcctgtccatggttttcacccatataagacatgcagatcccttcacattttgccatggtgtagatttctctattctcaatagaaatgcatgttgtgtcaaaccctgacaaccagatcattctgctgtgtgtctaagagcaatgtcttccaaacaaattagatcacttccatgtattttctgatatcttcctaagatacatagagcatggttgcatcataaatttattttttcttagactcactaggacccaaaataatactgctatcttaggcctctcctaagtattcatcttcaagtcacaaaatttgttcaagaataaggagtagttgaacatgaccagtctatcaattttattcaaagaaacacacatccgaagaactgcaagaagcagtattttatttagatataagattctgaataagtactattgagtctctcagtactgaaagcataatgtaatatggtttatatagatttcacttacagtttttatgccccaaactagaatacactgaacatcacataaactatatggataacaggaaagcatgcattcattaagttaatagtgagaatctataattgctacagatgcaaatcagttagatgaaatggctgcactacagtcatatagaaaattaattccaacagtgataatcattattatctgtaatccatcatcaggagagaagcaaattggaatattaaccaaaacctctgcacatactaaagttcaaagcttcctcatgttcaccccattaccctagctcacccttaatgtgctgcatgtccctgagagaaggcagtaatcgtcacaactccaattatcaggtaagcacacaaagcaagaaaatattatctcgcaatgggatgtcatctgcaaattggattaggttgggaacctggctaagagagacatcttgcctcatctttgagatttgtttatttatttattttgtcatctcaagctactcataaaacttccttgggcttttagtttcccatttggaaatggaataactatgactctgttgcccactttaatacaacacacacttggattctttgtttatatgataataaaagtgttataatgcaaaatacttcatagcatcattctaaacttggctactatttgctgtattttcacattatttagtgtaagttgaacattgtcttctgcacaaatcaagctagccaatagtccctgccatataagcacattcaaaatgtcagaggcttaatagcttgtcattaccatggatacatattagtcaccataaatacatcttactcatcttgacatttagtgagttaattactaatttttctctaatcgtccttgtggagatgcccacatatgtctgtagacttcacatatgactcttgtgagcccactgggccttgggctcaagtgacaactttgatcacaagcattcaacacaggcaaagaaaggttcatcctttagtgctgcctggtagcagtttacattacatactcccctctcacatttcattctccattgcttcttttacccatcaatctcttatgtccttctagtttcccaccagggcagcactctggggttacttctgtcactctacaatgaatccagggcttcgatttcctgtctgttgtactgttcgtaacagaataagactttataagtctttttaaatcttttattgtatctctgtgtctgtctgtctgtctgtctgtctgtctgtctgtctctctctctctctctctctctctctctctctgtgtgtgtgtgtgtgtgtgtgtgtgtgtgtgtgtgtgtgtgtaatgtcagtgttgtgacacagcaagtatatggagttcagaggacaatttttcaatcatgtgtctctactgtatgaactccagagagttaactcaggttatcagtgctggaagtaggcaccttaaccaactaagctatctggcctccccagccttaagattttttcgcttaagcagaaaacttggtgtaaatttattgtcacaggtaaatgaatattgaatagtatacaagtgaaaattattcccagttatttattccaacactcttgattttattttttcttgctttcttatgatcaggaatttgtttttatagcccaagtttaatttagttttaacaatggagctacatcaacttcctctgaatagaataaaggatgtttgcttctgtttggggaagaaaaaatccatgtgtcaactaagtttgtcaagttcctgagtgagctatatgaggggtatatggtaagccttaagaaaactctaattttttacagaatgttctcaatatcaaatccagtacctgagagacgtgaaaggagatgtgatgcttatattcagcagatctctgccataaaatcaaacgtccaatgggactggctcagataatgagatctgcagtgtcaacgttttgatgataagcgtgagaatattagaatcacaaatcccagaaactctgcaccctgacagcagcaggccctgacagttcccttgaaactttgttcttgctagagcctgtaacaaaaacagaagctgatgcttaaagaaaaacatgtatgtgcttttcaaaaccaacatctgccatccatcattcttgtcaggctaatcctagtctgaagcccagaacaccccaagcaaataagtacaggctcttttcataaaggaaataatatgcacaaattctgacaaaatgaagaactttttaacacaaacttgagatggttgaagcacatgaaaagtagaaatggatgtactggacttggaccaggcaggagtagttgagcacaggggactatcaacatggagctctactttgatatcaacaatgccacctgcaatcaagatgagagtcaattagaaagagtcctagaaatatttacatacaattatatacagccaatgaaatggagattttttgtgtagtgctacaaaaggaatagaaaaaaataaaagaggaaatacaagatttattttctgtattaaaatgaagaatgtactctgccattccaataggctttacttagtaggctcaagagccttgtgagttccagtttcaagagttgctagattttcaggtcttgtctgttctctttgacaggtgataggggctgttgctttgattgaagacaaggcaagtgccttctaagacagtttgtgtctctcaatatctgcaagcttgtctcctactagctactgttaaatagagttaccatgcactgttatccaactgtctaaatcctgcaagactggacacataagagcacaggctataagaagtgaatttgagccgggcgttggtggtgcatgcctttaatcccagcactcaggaggcaaaggctggcagatttctgtgagtttgagaccagcctggtctacaagagctagttccaggacaggtgaatttgttatgtccaaaatgaaaacaaagggcaacaaagcccagtgtcctggaaagttgttcctctaaggttcaataacactctcagtggtggattgagtcactagttcttctgcctcattgctcctaattcaagtgacctgcaaagaaagcattgcatccagttaatgtcaaataggtaatgttggctaaagtggagaagaaacttcaaagaagagaaaaggaacagaattctggctgttctcatttccatttcacagtctcagaatgttatattctagtttatttaacagtttttcctaaggactacaaataagaaacataatggttctggtccaacaccacatagagaaccgtccatcactcagtagatagcaaatacagtaaaatgtagctatgccacaaagggaaggtattgaacctactaagtgaggagagtatttgcagtcctcaaaagcactctgcttatacttagtacacaactgtaagaaatagagtctgcctacaatctagcccaagagtctagataaagagagataaatgacaaaagaggtagggagaaatatttgtataggtattacctcatgttgagtgctttggatcccctgtttatcttttgaataacttatagaggtgttggaatgggcatggctatcatgatttagaaactaaaatctcactaagcataaaggggtgataacaaaggcccagagaatcatgactagacaaaaccgtggacagtactccctgagatggctgaaaattctttgttttaatttttttttcagtgagcaaagtggcaaagagtgtctaaggacagcaccaatacctggactgctacagtccagccttggtttttcctagttgtcatctctgtctctgtatattccccctatatttcattggctactttgtatgtgaaccacatggtgtcaaacctattgtattcctagatggattcttggtttttaaaagatattttgcatattgactgatggtttcatatatgtatatagtatagtgttatcagattccaccccattatctcctacttccagtgaattgctcctacccaatgaatcccccctgtttatcatgtctttttgtttttaattttgtaatccacttagtttaattaaaattacctgcatgagcacagtttgggaattatttaccggaccaactacaccacagaagaaaatggctcacccacagcaaccattaattgacagttgctcttaaaaaaggtggtgaagcatcaagagtccctcccatagccattatggagtggttgctggcctaaccttgtgcagggcttgagtgtgttacctcagcttctttgggttcacaagtgcagggttcttgccctcttaattcttctacttcctatcttgctctgatcatatatataccattattcctgtataaccactaaacctaccctggttaaacctgccatagttaaaaacttttaaatgtaaggtgtaattatgtccccttaacctagtaacatatgctaaaagtgggtacttcataaacaattgttagaataaacttgtcacaatatcaattccacctggccattatgccttcatatacttatagcaaacacaaacatctaaggtagttttctacccattaagagaataaaactaagctgttctagtcatagatctttgtgttattggactttggcatctgaaacaaactattaataataccaattcctgttttttataattttttatttgaattagaaagattattttacatgtcaatcccagttccctctccctctcctcctccctcccctcaactaacaccctacctatcccatatcctttctgctccccagatagggtgaggctttctgtagggggtcttcagagtctgtcatgtcctttgggatagggcctaggcccacccccttttatctaggctcagggagtatccctccatgtgggataggctcccaaagtccattcctaatatggataacaggaaagcatgcattcattaagttaatagtgagaatctataattgctacagatgcaaatcagttagatgacagggaatctggatcaatcccattttggtttcccagctatcagtctgggtccatgagctccttcttgttcaggtcagctgtttctgtgagttttactagcctggtgtggatccctttgctcattagtcctctgtcccgcacgctctgtatttctcgccagcaagaaatcacacgcaggacactcggatccttctgcagacaagctttaatgcatcttgagagtgaaagagcataagcttcccagagcggagacttagcggagacattgaaccaagaaaaccatcccttataaaggctgaccagccgcctgggacgtgttaccctatgaatggctttagctcctcaggccaaaatgagccacgggataggcagagatcaaaggaatggaaattacccagcgcctgtgaagtaatttacatcttggtgtcttcaggcaccattataatgcaggaaacggccccttacagtcctccttccctgcaactggattccagtttagttcaaggtttagttgtgggtatctgtttctacttctatcagctactgatatgccaaccaattcctaattttaacttctaagttacctttgtgcttaatccaatgcatgtattttcatctatatacacattctttgtatgttcaattttctttgatttttgtgatatagaatgacttttcattttacttctataaccaatatctcattcacttaggaatatctatatctatctatctatctatctatctatctatctatctgtctatctatcccttttattactctcatttcctgttcttgctgtcttgggactatgctgctgaggtaacttgctgcatcagccttaataccatgttattccctgaaaccccaacaaaccaggtgaaagatgttctcacttatccactttttctctttttcactatatactgggcatatttgtctgataatcatgtgactttgcaattctaatattcagtgtagatgtaatcagttacacaacttattaaacacagcattaaatttaaaaaaatattcaagagttacatttttcttgaaacaatgttggcatgagactgtttgcaacatgttcacaaagatatgccatgtaagataaacattcctgagtacttatccttaaaaataaggaacaatttggcagctccacacataactattcactttcagtacaatctcatctgggcctctctttctacaacctgtgtcaatccaatgacattttaaaaatcataagaaataaataatttgttaagttgtggaacctagtaacagtcattgttttgtgtggaagattcactattttcaaatgaatttacctgtttcttaaggtagattgttaactttcatagatgtcatccatcaaccatttaaatcagttggtggatgttctacatgtcagcttataacaatgtatacttgggaaaggtacacctttagtgttatttatatgtttgactcatgcttacaaaggtttccaataagccttctcctaatatatcttacttgtggatgcttgctcatatgtttttgtacatacaagtgcatacatacacacaaatcaacaaaatctatttctctagttgattatatgtacctatttgaatatcatagatataaaatgcactgcttttcatgtgtgttcttgattttatctgaaaagaaaaatctttgcttctgatagatctaaatattacaaattattccaggattatttatgtcagctgaagcaacattcattgtatctatcaggtgatttcaaaaacttaaactaaccatgtaatattaggagcatgagaattctatcatctttaaaatactacatctaaactttgcttcctactttcttggcaagttattttcagatattcagcctcagttgggctattatgagaggagactgaaagacttgtgtgccataaaaacatttttcccagatgtgtcctgatttaccaaaatgtaacatacaactttggaaaaatgtgatagactaatgtgcaaactgctgaatccttacccacacaatttttaaagagtcggttgctacttattattagcatagatgtgtatagttatgggtgaaaaaatgctgctgtacatggaggagataattcatataatgaaattaaagatattttcaattaataggaaatgatttgataacaatattagaagtcagtattatacttatgcagccttgttataaaaggtaattcaacaagcaaacaaataaagatgagagactgaaatgaaaaagcttttccagtacgaaaaaagttaatactgcaccaccaccattttagctgtctacaaacaaataaatttattctacttaaacctttaaagagaaaggataaataattcagtccttcattaatcatcagcaatttcaccaagtacacaaagtatgagacgcaatctgagaaaacacatgggtaaaaagacagatcacaaatgaaacataatttcattgcctttaaatgtaatacacttagtgaagacagcaatggagacattgcagagtcttgaagctaagccatctgcctcttgagttaatgtatctattacaaggtcaccaacctgtactgtttaagtactctgaatgtaaggagcacactgtctcatagaagtgtttttgaaactgtcctaatatgttttgaagtggaatcaagtaggacaaaacagtagcagctaggagacattcttccttgatacaagccagcactctgtattccatccatcatctcttatgacagactcaaagccgatcactgagagaaatgctgtgattactttattaatttcacaaaggagatatctaagccacccagaggttaagaaatagcaggatcttagatattactggacaaagtcagacttttgagtttgtgctcttagattattcaagactgtcctttccagagtacagctggctgatgtagttaataaatatgttattttggactggtaaatgccaatagggcatggcaactcatctgcattcccactttaacaaaagcagtgatggagacacacagagaacatgcaggctagattagccacaatcagtgaacaaagaggttcagagagataacttattgtctgaacacaatccaagaatggagtcatgtgagcagaattttgagtgttgtgggtaaactttgagaaaacaaaacacgactcttgtgactttggtgtcttcaaatacacagaactgttcttggaatgagtttttgtgcacacctccctgatgtagaggataggagtgagtttacttcaaactgttctccagactactatacaaccagttagtattatttgtttaaatgcctgtacacgaaaatggctctgctacatgtagcttctctgacatgcctcatcttccagaatttccctacttgtgcctgcactgcttacatctgtgccccattggttccactgcctttccctcccctccctgtgtcacatgtccatgtgcctctcttccaacactacacaccttcactgtacagataaccaaggggacaaacacagagcattctccaatctcaacatcttttaacacctacatagagtattgctcagacctatcacatttatggacttcagaaatgagttcacttagcttttgaatatctgattttccttgagcctttcacatgaaatagagagttaattagtttaaacaacaacaaaaaagatttatactgtagtggtatgtcttttgtgattgaaaatattaatgtcattttcatgattgttttaatggaggaaatttaagtgaggaaagaaaagacagctatggcaaagaatagaacttggatgattctgaaaagcatgcatgatgaaatcacttgagtgttttagagcctggaatacattgtcagaagaatacaaaaaaatgtatgaaagaattctagagttataagattggatacagtgcaacccattcaaaactcaccagctctatatatagtgggatagctaaataaatcatgaaaaaaacaataggctatggtaatgaaagcaatctctcccagacagactgctgagtcaggcactataacacacagagtcatctctgggaatctgacacacagtaccaaatttagccagaactcccccacccccaacctccagaccctacctctctaccctcctttcaaactaagcttcaggtttcacatgggaagaacagcaatggagcatttcaatgttcctgaagcatagtagggaccaatggcttgacttttcctttttctttgtttggtttttgttttgttaagaaagggtttctctgtggctttggaggctgtcctggaactagctcttgtagaccaggctggtctcaaattcacagagatctgcctcccaagtgatgggataagtgcatgtgccaccaagacccagccaaatggcttgacttttcttggatgggtttgttgtttctgtagatagttgtgatatgacagtgagtaggcaagtgatgctaccttcctcatgaaaccttgtgttaaagcataaggccaatcctcagtagtagagtaaggagaagtaatattccagaacctgatttgagatatcagacagaaaactaaaggaaacaggaaatcaagactgttgctgctgctgcccagaatccctggccaatcacctttggaatgtaatcaggacatcacacagtacatagaaaagaaataaagatagcagccagattgtagtttgcctgaagatcaaagtgcaaaactagccacaatatccagccatacagccaagacagtagtggtacatacctttaaagccaggactcaggagagagagggagatggatccctgtgagtgcaaggctaccctgggctacatgagagtgaattactctaaaagaaaaacagagctctcacattaatccccacattagggagatggagacaggagtgatatggctgggcagagaaagaaatataaggcaagaggagacaggaactcattatagtctaggcagtgtgaggagcaatgcagtttggagatgcaatcagaggacagaattaccacaacattgatagaggtaagaactctctaatgtttggcttctttgcttttatggtcttcaggcaagccttatttgttagatcataaacaaaatatcactacaccagatagcttaacacacattagaagcagcatgccacccaccttctctttcattccataaggttaggcaagcatatatcacaaatacagagaactgctttgtcttgttgtgcctaaattttcttagcaatgggtccatggctatgtctttgaagacctctctactggctgtggtcttcttccttcttggatctgtgtttgctcttggttcacagagtaacaaagtttgtaggtccacagttttcccagttcataaaattgggtacccagagggtagattagcaaagcaacaaagaagtattttaggtctattaacaactcaatagcatcatgacactacagttaatcgatagaatgtagtctactgtttttaaattaaactatgttgccttcagctgaagaatccagtagagctttttgtggccagggcataattgaactttgtctgcttctcaggattttctgtccagagttacctaacaatttactctccaagcagattggtctcaagttaatttcccctaactaagggatgccaatcagatctaaaacctgtaattcccaaaacaagatctgcactgggaaatctggggcatgaagttcttaaaggacagaacaatacaagccagcaagagtccttggctcagtgctctctgagccagtaagcagttggctccatttaaataagctaaaaatagactaaccagcagttaaaattttcagcacagcaaaaagcaggtaggaccaggcttctctttgatctccaaggtttgcttcattgcgtctgataatggtgcatgacgtgaagaatgtcagcgatactgtggtctcgcattacccgagccgaacttggtcatcagtgtaatttatctaagggcagcttactgctgaataaagagctcggcttcaagtcttccagcctacacagcaggactttctagaaattgtactgctggcaaggaaactcttatttatggaaccagggaagctcattagcgatttttttttctgggtaggcttgcatgcaggacactctttatttctttatgtggtattgcagggttagtcttgatcacaggaatcgggaaagcatgcagaatcaagcatggtttatcagtctaagaaggaaagcaaaccaggataagcattaaagtacatttatttgccccggaggcaaacacaagttagcttcccttttcaaataggatggagaatacaatgttgctttcatttagctgaatcaggaacctaactcccaactgcttaaatttcaacctgtgggtcacaaccccttcaggggtcaaacgaccatttcctaggtgtcacacactagatgttctgcacatcagacatttacattataattcataactaacaaaattacagtcaggaagtggcaacaaaaataattttctggttgggggtcaccacagaatcccagcattaggaatattgagaactactggcttagatctctacatctgatagtgttggtttataaattccaaagaacattaaaaaatgtctaatatataaaataaatatcattactctccctaaatatttttatcatagttacacatctttaaattatattattcaattactgtctttttctcttcccaagactttgcaacttagataatcaatggactacttcaccaaatcatctttgagttctatcatccagtgttgacctatcctttgaaatctttaaggaaaaagaactattttcattcttgtcatttatgttcaacaaaaattcccaacaataagcagtattacaatctattatgtatcttttaaagactacaaaggctagaggtaaaataacattccaattaggtgaaatggtcttctgttcagtcaccagagcatttttatttgtgcaatcctattacaaacaaatgaaaaaggaaacaaaaacataggcaatgtaaatggatttttctttgggccaccagctcacaaaaacatggagacttattattaattatgaaagcatatggctttggctcatcccactcgctcttataactgaagttaacacatttctattcatttgcatatttccatgtgactcgtggcttttacctctccacctacatgtcttgctctttctctctggatctagatggtgactctgtctctcttcttcccagagtcctctctctgtccagaaggccctgttacaccacctgcctagatattggccatttagatttttactaaaccaatcacagtgacacattttcacacggtgtaaaggaatattccacaacagtttgaggttaaaaaattccaatcattccttcctccagaaaaaaaaaaaaatacaaacaaatcggacttttcctcctgtcctttggtacttgtctgcttatagattcctataaatctacaaaactctattgatggttgtctttatatttatggcagcttcaggtccaatcttgaatgctgtagtcattctcaagtgtcctctgactggcacatatttccatgattaatgattgttttagcagcctccttcttatttgttataaaacataatgttatgttatacttcatcttctttttttaccactcttgagtctcatgtctacaatttaaactaacaaataatcagaaggatattttctcagagtgtccccaaggtctatgctaaactccactcaacttccaatgggattctcagaaatgatgcccagcatcctgtgccctgcctctaaccataacttctcagacttcaccatctgtctctagcctgttttcctgtcttctccttacagaaatcactcattgcttagactgtagactacagaccttgttttcaaattctagatttagcaaaacattctaattaatattccacttatggacctgttctgttattggtgtacatttgatagacacttatacaaatcaacatggtgatgccttgagatggctcagcagctaagtttgcctactgaggtcaagccctgaaacttacatgtaggaaagagaaccaattctttcaaggtgtcctctcaccttgacacatgtatgcagtgacacacatgtgtccatacatgaatacatactttcacataaacaccctatatgggggcacacaaaaaattaagtaaaatgtaatacaaattttaaaaagaataaacatgatgatcttagttttatacttacacaaaaaagtatgtatactatctacaacctccattatataattgactttttttaaagaaaaaaatgtgtctggaagcagaccattttaaaggttattcgggttctggagagatggttcagaaattaggaacaactgtaccaccttcagatatctcaagttcaattttctccctcaattaagtgacacataaccacaggtaacaccagcaccagagaatccaacacctctcctggcttccttggcacctgcacacaggtagcatacatacaggcacacagggaataaatcagtaaatggggaaaaggcttattgtaattgtgtatgccctttctaaaatctaggtgttgccatgacagttcaaatgtattgtagtatattacaaggtatgaggtgtgtgagacatttcatcactggtttaaaaggaggaaatttttatttaagctcattttggagggtgcagtccatgatgggttgactccattctgaagccagggattacatgacagtgaggtgatcataccctgaggctgcctccaccattattggtctcaagatgctcatgaaggaggcttactgctgtgctcctccggcttgcactgtatcttcccaccatgtaattctgtactactcctcctctccagtgtgtatagtctccacaatgcatctcagtctgccagctccttgatcttgtacttcccaggtttcatagttgggattaaataaatttaatagttctaagctggtaagcctcagatattttcttccttccttccttccttccttccttccttccttccttccttcctttctttcttttttatttgaattagagacaagattgttttacatgtcaatcccagttccctcttgctcccttctcccctactaccccaactaaaactcaacctatcacatatcctttctgctccccagggagggtgaggccttccataaggtgtcatcagagacgatcatatcctttgggttaaggcccaggcctaccccatgtgtcttagctcagggagtatgtggagtattccctctatgtggaataggctcccaaaatccactcctatgttagggataagttctgaactactacaggaggtcccatatatttctggggtctcctcactgaaacctatgttcctgggatctggatcagtcccatgctggtatcccagctatcagtgtggggaccaagagctccccattgttcaggtcagctgtttctgtgggtttcaccagcctggtctggacctctttgctcttcactcgtttttctctgcaactggattccagttcagtgcagtgattagctgtgggtatctgcttctacttccacaaggtgctggatgaaggctataggatggcatataagttagtcatcaatctcattatcagggagggcatttaaggtagcctctcctctgttgcttagattgttagctggtgtcatctttgtagatctccagacatttccctagtgccagatttctctgtaaatctaaaatgtctccctctattatggtatttcgtttcttgttttcttctattttcttataatatcaaaacaaatagattaagacacatatgaagaaaatcatttaacagactcttttgagttttcaaaaggcaaatatatcagctagtcccttagtcttcaaaggatgtatacatgccattcaacagatgcaatttaatattagtaggaattatgtgaagtctagagataaacaaaaaaagtctgctcttatttttagagttaaaaaaaagaaaaaaaaatctgacaatgttcatgggtaagacccagagtttttcactgtttgctcactcttccacatgctgggactgtcaccaacctttattttgttttgttttacatgtggtgtgtatatgtgttcctcaatatgccagggaatacttgtggtagaggaaaactttaagtagttgattctatgcttgaaccatttgatccccaaggactgaactcatgtcttccagattggcaggaagagtttttaaccactgagcctgcccccttgccctcccagattttaaaataagcaatcattcaagcggccaacaatatcattccttttggcacaacatcattttgatccatagaaaaaaatcatggtgttattgttctacatatgtaaatatattcagtcacaaatgtagccattaatgttcctgaaccttattttctttttttgtttatttggttttttgagacagggtttctatagtgggaaattaccaatacggagtcaggtagaaatataagggtatttaatagggaaaagccttacttacatagcgacctagccagcccgcacggcagcagtctgtccagcaagtaccaaagggaaacgaaagagaaaatgcagtcactctacctcaccctgaccatgccctcgaaaccgtggtcaggcacacctgtagccaggccctaagtaagcgtggctacagcttcccctacaggtttctctgtgtagctttggaagctgtcctggcacttgctctggagaccaggctgaccttgaactcacagagatccccctgcctctgcctccctagtgctgggattaaaggagtgtgccaccaacgcccggcctgaaccttattttcaatgccccaaagcccaatttccctattcaatagtgcccaccatgtcctcattgcttccctgaagcagtatatgtcaatgtgatatcttttaatccatcaaatggctatacctggggtaactgcaaagtcaaacttgatgtctctatagctcagagaagaggctttgagggctttttataatgtgatagcataaaatgaagtatctctaaagtgcccttctgctttcctctttgctaatttcggaataaaatatctcaacaccataaggggttggagaataagcattaaaacagacattcaaaaaatgtgcttagaaggatgggactgtgttaacagtaaagaggaccagagaggtggagcttagtacccagtcctcgctagatctgatctctttggagacagaagctactgggaaggtcaagctcaataccaagtccttgtggcagacctgtgctgctttggagacagaagctttcatattcccagcaaatggaagacagggctcagtctgtgggtcatgaagagaagctgaccatcttttagaaatgctgtcagcctgtcacagtcagccttctgtgtgaccacgcccaactacttccagaagacaccaaatactaataatccctcccactctgactagagctaacagaatttacgttgtcagtgttttaaccttcaatactgtgttgaaatagatctcataaggttacataactcatacaaaaatacatttaaattggagttcaaatcaatgccggtagctgtttgcttttttacaacagtaacatcttagaacacataactacacggtttaactcaacttggcaattaaggagaccatgctatgcactccacatgcaaaaatccttttaaagtaaagcagatgatgagaacatactgacagaggtatcaatgtccagctaggtagcttgcctgtgagaaagagtaaaagcattgtagaaacaaaaggattagggcagagcactctagggctgtttgatgcatttagagtgtgcaaaatcagagggcacagactgctataccttatgctaagtcatgaagacaggaagcactccaccaagcaggggctttagacaataaggaatggaaaaacattttgaaagtgcattttaaggggaacagtattatgttaaagtaaagcaggtttcttggaatctcacatatgattatcctttgtctttaatgtgacacacttacaattgttactgaatatcaatgagggcataggttttttttattttgttttgtttgtagctaaatgttatttttaaacagcctaggaatgatgatgtttatcttcataattgttctgtgaagtcaaacatgtgtgtatgcatgtgtgtatgtgtgtatatatgtgcatatatgcaagtgtatatatatgtatatattggtatgcatgtgcatttttgttcatgtagtatgtgcatgcatgtgtgagtatataagtatatgtaaatatatatgtatatgagctttgtacatatatgtgtctgtgaatgtatgcatgtatgtgtgtgtactgtacatatgtatgtatatatgtgtgtgtgtataaaggtatgaatgtgtatatactcttgtaccttaaaataaatgctattctacattctcaaaatatccgttgtagctacaagatattatggaagaaaatgcaagtcaaaatattttttttttctgttcaacatgctatgattttcatatctaattaggatgtctttacattacatagacaattacaaagcagaacaagagtagctggggaattttaaagacttaaaatacagatggaactgccattcacaagaaacatacgcagatttgctttgttctgttttgttttcagattattttattgggcttgaaatgactctttataataggacaccctttcttgatgagaaaacactcaagggagaagaatatttttttgtatggttttccaagacagggttttggaaggtattgttttggaggctatcctggaactcactctataaatcaggctggcctcgtactcacagagatcttcctgcatctgcctcccaagtgctgggatcaaaggcacttgccaacaacaccctaccaagaagaatatttctttaagttgccattggtaacctctttagagctacttgattgacagctggtagaggcacttagaggaagacaaggtctggaagcatcctaccacacaggggcaacatcaaatcctctcattagcctggtattggacacaactaatttcacacttcaaacagtatttatttcatttgtttggcttaggttaagagtctttctttcttgttttgtatcctccaagattctgtataccaagtaggatacaagcctgtgaatgcttaaggatacaagcataagaatgcagtgggagccatggcttttttcttttacattccatggtcattatttccctaaatactcaatgaatatacttgtttggagctacaatcaaatattaagtaagtgttctccatttttactttccacttctatttggagatacatttatagaattattttttaaacagcaatatagaaatacaagaaatagcacagtttcaagaatcaagcccagggtcagctaactcccttgatctgggcctgaagtgaatcagcccctcgttgtgatgagaacctatgtcagaaaagcttcaaaaccagagccttgaaccagagtgagagacagaagtgaccagggcaaggcaaacttcaaagaccctactgacctaattcatccaacttcccatagttccaccttctctaaaaaaaccttttcaaaacaaagaatatatcattttttaaatcattattttcaggattcagttgctcccataatgtccttcacattcaaaccaaaacaaagtctacaatgaactgtagttccttaactattttccctcctcttagtccctgatccaaaataaattcactctgtatttcaacttatcagtctctcattggattttcttcttgtgttccaaatcatcaccgccacaggctagccgagaattggacctctatttggaaagggttaggggttacagtttgagttaaggttagggtcaacctcccatttctcttgctggatgatgcaactatctcttactcatcatcttatgagaaagccatcaaagtggtaccaatttgcaatgttgaagaaaaaattgcattgtgccagacacaggatggattaagatcatgggcttataccattggtccacagttgatggttggcctaaaagcatcaatatttgcctatgttatgaaccctagcaagacatgttctgatcatcccagtgactcagactaatggcattcatagtgggtgtaggagcactgtttcttctccgcatagtttgcccatcaattctggaataatctactagatttgtgccctttctcagacaacattctagaaatgatggtgactctccaaggactctcaagacagaggcttcaatttctcatctgtatcctctgtaccctccaatggattcaaagaagttactttccagctgtttggcacatgagaccaggcttcattcccaagttctcctctctcttaccttcccacctttggcagacacaaggcagggaagtacacaattccaaagatgtttgaaattctgatattgttatctaaagatttcaacagaggcctggatggaagcatgccactagaattatcttattaaaaacttaataatgaataaaacaacacaaaataagtcacataattgttctaaattctatcagagtcttgacacaatagcaagtgtgataatcatctgtgaaatgcagaagtcacttaaactgatattcatagagtcatggtgagtccaggtttagatggtgggctaaagtgttgtaacagaaacaccaatgtcatcccattcagagaggttctgacacaattgtcaatatcgttaccctctgctaaagcaggaaactataacaccaccagggacagacttgcatcagcacaagaaatgatatccttcacacaaagaaataaaacttgcacgtcacaaaagataaacatctcctttcctatatatcatttatccattcactgaaacagacacatacctatgacttgaaccaatgaattttgtcccacctaggaaattaaattatttgtataaccaggggtctgatcaaagcattattctgtttaccaaatagccttatttaatttctatatgaaacataaaattgcctattgtctttccagtatagacagaaaaagatgtgtatttctttaaattcatgtcctgttctcatatagaaacaatcccaatttctcagtctcaatcccagaaatttcataattgtacactaaattggcatctcgaagcttttgttttagtattttagtacacctataccacatattatatataatgatagattttcaagaatttattcacttttaaaattaggatagcaaatgttcccagtttataaaaccataatgatgcttacacacaaaataacaaggttgttttgcacaagccacagaagcagttttgtctcttgttatttggggaagaaaagaaaaccccatctcaatatcatttttggattaagaggttatagatattttgatccctttgatcaaaattctgtttaaactgctctttttctagctcgtgtcctattaggcacttcctagaccattgaatatccaccatttggcatttccctttgggattcctgagactcagagtcctcctgtgttgaattatgtgacacccactttcttaatttattttagttggacatatgagaaattaagtattggattacagaattggtatatggggaaaggcagtgggacagagagagtgttaccctggaggaagagtacataaaaaaaactctatggaaacctatctaataatcccactaagcttgaaactggaaaggatagttagtaaagcccatgtgatgtagacatggaagagggagctaatttctttttgtcttcctttcttttcttttttctttttaatcagtggacaatgctactgccattaaatagtagcttgtggtgatttgaaagaagatggtacacatagggagtggtactattaggagatgtggctttactggagtaggtgtggtcttgtggaggaaatgtgtcactgtggggtgtgggctacacccagtctggtacagagttgattatgctgcctgtgaatcaagatgtagaactttcagctccttcttcagcaccaagtctttttttctagatttttttattcatctttttaaaaatttatttagataccaaccacacttttctctccttccattcccttttccccaacagccttctactgaacacccctccactcatcctctgtctgtccatagtctgagttcccacaagctcagctcagatgtctctgtggttttccccgccataaccttgtcaccccaccacatataatccttccactctttattcaactggactcccagagcttggcccaatgcttggttgtgggtctcttcatctgcttccgtcagttattggataaagtctcaatgatgtcaattaggttagtcaccaatctgaaaagaggagaaagccagttgaggcaccctgtccactaatgctaggactcttagctgggggtcacccttgtgggttcttgggagtttccctggtacaatgtttctccctagccccataatggccccttctatcaaaatatctctttattactatcctcctccatctcacccacaactcgaccacactgatccttcatgttcccatcccccattccctatcccttcccccgtacaacctctctgaccccagtttaccaaggacatctgacctattccctcttcccagggagattcatgtttccctcttagggtcctccttgtttcctagtttctctggggctgaagattgtagccttcttatcttttgctttacattaatatctactcatgagtgagtacatactgtatttgttttcctgggtctgagtcacctcagaatttttttctagttccattcatttgcatggaaatttcatgaagtcattttttttccacttagtaacactccattttgtagatatagcacattttctttatccattctgcaattgagtggcatctaggttgtttccaggttttggctattatgaataatgctgctatgaacatagttgaccaagtctttatacactgccatgtttactaccatggtgataatggactaaacctctgaaactcctaagccagccccatttaaaggttttcttttacaaaaagccccaggccatggtgtctcttcacagcaatagaacactatgacagagatatgaaaaaaaaaaatcacagagataggcactcatacctctctacagtcctgcagctgccagatgttaaatggtgggctggtttcctaacaaactagaggagaaatcctgatctattgttaaccaaaatgaaaaacaaacaaaaacaacctcttggcatatgaagaacattttgatatattctgtctgtttttcttcactgatgtttcatgctgttttgcaaaagaaactggtatctcagtctctaagcactacatccccaggctttacaattggtgtgcacatcaacaagttgagagagttcctctgtctctggtatgctgaattgtcattgtcccacatgggaacacctaaacatagaccagggcttatggataacaccagcaatagacaagcattaacctagcaccaaaggctatcttgagacatttattgtggtattctcttgtattgaaaggaggacctccacagggaatcatcaaagtctttcacatcatttgggggagggcctaggtcctatttcttgtatctggggtgcaatagtaccccctccatagggaatgggctcccaaagtccatttgtgctctaggcataaacactggctccactgttagagggcccatagactgtcttggtgtcctgtcacccacattcagagggcttggtttagtccaatgcttgttctccagcttcaggactagggtctctgggctctcactaggtcaggtcaattgtttctgtgggtttctccagcacagtcttggctcctttgctcatccatcctccctctctgcaactgggaacccttcactatccttggggagtgggtgggagtgttttgggtaggtcagtaggaacattggagaatgggaggacgagggaaaggggggattgatatgtaaataagagtgcttctaaaacaaaaaaaaattaaattaaaaaaaggtgttcctgtggtgatattttcatgatctaacaaataaagtttgcctgaagattagactgcaaagctagtcacagccatagctttccggcagtggtagtatgcacctttaatcccagacaggggcagatggatctctgtgagttcaaggtcaccctgagctataagaaattgctccagtctaaaagagaaacagaactcacacaaagttgatctcagtgtttgggatcccatgcctttaatcacagcactaaggaggagtataaggcaggaggagagaaaagctcagggcaatctggggtttggtggagacggaaacagtctgaggcagtctgaagtttggtgatgtaatctgaggacaggatcagcctttccatctgagcattggtagaggtgagaactctctaatgagtggccactttgcttctctgatcttcaggcaagattataaacaaaatatcacatgcaccttttaagattctcagtcagggcttgcaattatgatctattaaatatctgaacagtctagagaaggtaaccaatctcaggtgatgtgcttatagataggaattttactctccatttaaagaaggtcacttactagagagcaacaaaagagattaattttaacacaaatattggctaattgttcatgacaaactgagaagtcagtttgtagcaggggatgttgtgggaggatatgtggttcctccagcagaatgtgacttgatgtcatgtagaggaatagggactagattcctattccagcaaaaaggaaactgggagaaccttgacaagcagtagagacatgaaattctgttcacagattatctccaagatggtcatagcaagattttttatcttctcgaaacaaagtctaacataccaccagtcaattttgattctctttggctccttgagttaaattttgtatgttataaactaagtgctcatttatacacatcacacaataaatttcaatatgacagattgaacaacatttttacatgtgtcaacatgggaactactgtcagtttttcagacagatgacagaggattgtagatctctaaaatgtgtagaaaagtgagaatagaatatcagggcttagacttgattcaactgtagaactcttttaaaaggtttgcaatctatgtctttaagaaaaatttaagaataacagaatttgctttgtgggaagttaattctactttccttaaagaagatagaataaagatgggcttgagaaaagaaaattgtttctttacttgatttattctgtctgtccctgtaaattatgactatattgttcttgacctgattttataaaaaaatggatgtcctgatttctgtccttcaggttctgtggaactcacctcaccccaagatggagagtcagtcttccatgctttcctcactgccccttcctttctcatagtccaaaaccacacacttcaatagcatcactcgcttgacctgactgggaaaacaattcttagaagctgttagaaattggcatcctgaaggttgatgtgaagtaatgaacaatccaagcaaacaatattcagaacatacactcaacctgcacaatctattttagacaaacaataggaagctttaaataccctgtgtgtcatggtggctgtttagaaatgacatctttcaggtgtcagagagtcttgtttgctctccctcacaaggtcacaggggagacagaacaagtttctgtgatgtgataccacaaaaggaaaaaagaatagcatgcccatgacctcaggagcatgagaactgcatttgttcttttgtaaagtgttggctattatttatttagatgatgataaattatccccagaaacttggcaacatttccatataattattcctcctcttaaaaccgtatttctttttattaggctattaatttgtctcaatgtaaaataaatctcaataccacatatacccataagagcatactacttagctgcaacagcccaaaggatggcatttaaaatgcaatagtttaatgcatagaattaattaaactgtatcacaaaatttctaaaaatctcattatattcattttatatcttctatatgaaaattttctcctgcctataacagaaaacttaagagtaaaaagaaataaaaaactttttttttctgtcaccataatggtatgactcagagttacatgtgaagaatctagctagttgcaatttaatcaacagtatctcacacaagattaagaaatctaggagcagttggtaaagtagtgaagagctataaacaataggatcctatcatctctattgttaaaactgacctgatttttaaaaaaagagccaagaaaacaaacaaacacaaaaaccctccaaaacatatccacagtagctctgaagagagtctgtgtaaatcgaagtcagagttgcagaccttcattctttggcctgaactctgtttttatagacaagaactgcaatgattatgtcaattgtcaacttggagatatagagtcacttgggatatggcctctaagaatgtagggaggattatcttcacacatttaatcgaggtagaaagacccacacactatgggtagcactattgtctggactggaatactaaattgcacagagaggaggaagctctgagcatgagcattcttcactctctgccatcatgacttccctgccatggtgaactgtacccctgatctgtgagctgaaataacccccttctcccttaagttgcctttgacatggtattattatcatagcaacagagaagtctgtctgacatcaagcagtaagaggcaatcattctttctcctcctacagattcctattactattaattctttctcaaaaattggatcaaagtgaggttgatgtaacacagtgtggatatgctcaatgttttagggatagaatttgaaagattattagaacataaaactcctaaatacaaatacattcactattgcactttcacttaaagcacaacagccactctaacactttcagatgaaggaattcccattttcccacaggggaggtaatactgaagggaccaggcccccatttcagcagccatgacagtaacacaacacgtgctcgctattaccttgccttggtcactagaggttagatgcctgcctcgtgacaaggaaccaattagaagttagctgttggtgctatgctttacgactctgtgtgtaatttacagacaagtgcacagcaatgaccctcagagcatagcaaccaccctgggagagcctatgggtcataacaaccaattgtccaatcaacacggggcaagccctccaagcctggaggcacaccaatcctgagcctgtgtgtacccctagacactcgccttatgatgccctaccagatcactcggcagctggttcgaggtgtcttttctagccatccaccatggccggtgggtgaaaaacctgagctaacatggggttagctcgttacaaaacaataaagcctcatgcattttgcatcaagctctcaaatttgcctggtgattggggtgaccatggtcattgcctgggaccctggatacctgagttttctgggggtctaacaatacaacatctcgtctctcatcgcacaaggaaaaccatgattgcaccagtaaaattaatccatcaacagtattggtgcaaatgtatttgtagatttatgtgcagcagttaatgtgtggcaaataatgctgtgagagtttccatatccagaaatgaaaactaaatcagtcatcagtctataccataaacagtatctatctggctcttccccaacagcaccaaaggttaccaacagtttttgtttgtttgttgttgtggttgttgtgtttccctttttccctatgggaacaactcaaactctatccctataattaccaaggcctaatagggcctgtttccatggagctatttcagattcttttaatctctgtgattaaaaatggggatacaggtctacaccctctgtttctcagattcccatcacagatctacgtgttacactatgcagccatatgtgggttacacaaggctacagagatcaagtgtgcttgcccactataatgatcagtgatgtcctgagtgttattcttttgtttaaaaagaagaaaagagaaatgctgagacatgaggcatgttgactataagtttattataaggcctggcagagtagggaggctaagaagagaagaacagggtaagtggctgaccgccatggccagttgctacagagagagcatataggtgggaaaactgagtagagaggaagcagcgaggaagccaagaggaagagaggaagcagagagagtaaatgggcagggatctttctttttgaagaggtcctctgcaacttcgtgcagactcagttcccatggaaccttgagctgaccagggtactgcctgttccaccaggtaacaggggcaggccagcataatnnnnnnnnnnnnnnnnnnnnnnnnnnnnnnnnnnnnnnnnnnnnnnnnnnnnnnnnnnnnnnnnnnnnnnnnnnnnnnnnnnnnnnnnnnnnnnnnnnnnnnnnnnnnnnnnnnnnnnnnnnnnnnnnnnnnnnnnnnnnnnnnnnnnnnnnnnngcgttgaccatctttgggggacccgagaagtttggggtgctgtcacgtcctggggaatctggttgtttcattgtagttcaggctgtatggaactccctggcacctcttagacctgggaagatgttggcagagcagaagacaaggttgagtttagaaaaaaatttttcttaggtcctgtcatggggggaagattgtaagatgagggagggtttcctgaggagtcccaacatgagggaagggattcctgggaccaggataagattgaataactggagtgaatctgacctgtttgtttggatccaatccagctccctggaacttacaagaatccttagagtttgttgaaacataagtattagacacattagcagcatatttatgttggaagcaacttgcctgaaagcattaacattttaaaattgacaatttttttttaggacaatgaaaagcatcttaatcttgaccttgtatttatgatcatatagtggtattgtagaactatgaacagtagcatgagaaatagagaaatcaggaacatatttcattctctttaatgtctcaacttattttataatcacttaagcctttttatcctcaggccttcgactacattctcagaccttcatacatctgacatttcctatcttcacatagataaaccctaaaatacctgttcctggaatctgttttgctttaagctggcaagactaccagtcgtcaaaagcatcagagttcttgagaaggataagattttacctgaatcaatgattaaagaataacagggacttgccagcaggctgcatggacacctgccttcttgctgatagcatgtgacctgtggattagactataggaagactctcctaaagttgtcccaagcaatgcagggaaagtcgattctactgtcatcttgtccacggtctggaatactttgtagcagttgagatgaagggcagggttgctcagtgactagtgttgtcactgactccagatgaagtttcttcagtgcccatcagtcttcttggaggaaatggggtggggccagcagctggcctatctctctgttataaaaagctttttaacaaaacattttaaatgccatattctctagatctctgagcatttgagggctgtctagtttagtatctcagcagttaagtttgtctttagttagagaaaaaaaaatccgtttttgtaattaaagttgtacctttgtaaatggcttacaggatggactgagtggtataaatattttgttagtttaaaatagacctttgtgattttaaacttttataatcatttaaagatacatgggttaaatttaagttctatagacttagcttatattttaagtatagttaaattagacctttatgactttaaatgtttaccatcatttaaagatatatagcaatttagaaatatgagacttaatagtttaatttaagttgtatatagagctagataagtataaaattaaattacaggtacaaaataacaggtacagagacaagcaggactggataacagtaaaagggggaatcagaatgtagcaaacagacaggagatttaaagggacagagtagacttaaacagagggcctaggaaaggcacagtatttagtaaacaagccatgaacaacagagccagtaaaagaagaaatcacagacaaaaaataaaataaaaagcaaaaaatctgtcagaaatcaaaaatccgacagacaggtttgctggcacaggccgctggagctgtgcatgcctacaggtaggtcacatgaccaaaacatcggggactgtaagactcttttggctgtttacctgcttgttttatgaaaccagaaaggttcctctatgcatttcccataggtgaggcaagtggaaaaccggcaaaaggctcctctccggatgcacgtctgcccgtgggagttgccaagggcctgcccccgaagggtacacagctgttccaaaactgaaaaaggacacagcgttctgaactgaaaaagccaaaaagcaccactcttggagcagaatcccacgcttgaccctcaggaaatgcacccaacaagtgaaagaaaaaataaaaagcaagatgtcaggtggcagtgcttgcctgtgcaagtcactgaactgagtaggcaggcctaagctagatcatgtggttatgaccaagatggcagcccccaggttagcacacatggccaatagtggccctcgtaagcatatttgcaattgccagaaaagtttcaaacctcattcatgtggaaaaatgagaaccagcaaacaaacaaaaaactctcagatcatctcaagcagacattgccaaccaagaagaaacacagtcagagatagaacatagagaacaatgagggacattcccaggtgaaagaaatttcccaatgggaggtagaactccactcatttatctattcgctggtagtagccgaaagatcccgtaaaatgtatttcccgttgacaaggccaaaaatggcacagattgctctgtctaagaacacctggcagaaagcccgaaagaagttcaccaggctgaaactgaaaaaaaaaatgaaccagagtgaacagtgctgggtctgccccatgggaaaagggatatcttaccggattgcagcaaacatgtagatgagtgagttccagagatccttagttggaaaagcagtgagttgaagtgtacagagttccagcaggaagtgccaggaaaagctgagatggaagtgggttatgagttcagattttaggatccccaagatttcccgtgctcctggcaggaaaagttacaaagaaagtttatcccaccagcaagcttcaggagaaagtctacggagagagcctaaaccaagtcaggcgccaaatgttattcttttgtttaaaaagatgaaaagagaaatgctgagacatgagacatattgactatacgtttattataaggcccagcagagtagggaggctaagaagaggagaacagggtaagtggctgactgccatggtcagttgctgaagagagagagtataggcgggaaaagtgagtagagaggaagcagcgaggaagccaagaggaagagaggaagcagagagagtaaatggtcagggatctttctttttaaaggggtcctctgcaccttcgtgcagactcagttcccatggaaccttgggctgaccagggtactgcctattccaccaggtaacaggggcaggcctgcataatgcctgatcctttcactgagtttagtgtcatagaccacaaagttgtggaaaaagaatattagctcacagttgaaaatagttgagattgtggtcctgtctcctggaaaaattagagtcctcttgaatactagaacttctcacttctcttagtcattttcagtggattatttgatgtatgtttgatctcgcagttttctgaatctctaaaatgggaatttttgaaaaggacatatcttaagctggtttctgttttaaggcatttatcatatgtcctagggtatcacacaatatacttggttattacttttcagccagcagtgagatttaaatttctgtcaaatgagatgctcttatatgataaagaacatggtgtgtacagtgaaggcccactgcagactctgcaataagagtcactattgtctagagagtggaccagtgtggtagcttacttgctggcatgcatctgtgtagcaagccctcagtgggaattttatgaatagacttctcctggagttgtatgtcatcatatcatttcctgcagtgaataagtgaacagagccattgtatctggcatcaattcccatgtgttggcacctgggctctgatgtgccctttgtcagtgactgttatctgagttactctattgaagcagtcacagaacttttccataggttagtctcagacatacctggtaaaccaggaagtttcttgttgctgagaattgcttaggtagtggttgcttcaaacaagtccagataagaggtcttggtatgtgaaaattgactttctaaagatgtctttgggttacaataaagaggcttttacaaactcatgaggcagtctatgagagtctgtttcttggcccggcctgtctcagctccaagacacggaaaccatgaggttcggcctgagtggggaagcatggacttggaaactcctagcaacccaacagcgataaagaccaaacacaagcatcttgtcatctttaaagagctctcagctccatgctgcaaaactggagtctcttgtttattcagcattttcttggctgttttctaaccatgcttccatggccacaaggtcatttctttccttctgaaccctctcagccccgtagctcctaactctctgtcctacttattacttaaacacctaacctcccacccagatgcaggcctattcaaatgcttagtcctgtagagatgcaaacaaggaggcattctaccctgaggctatgctatacaatagcagacttgctcgaattagcaatacaatagtgggccagagctcagggtgctcctgtttactgaaaccagaggctggaccttaagacattccataatggaactattttggtcctggacaagtctgactcccctgctgctgaggaaggagtaaaacatgctggagtggttgcctcctagaacatagaacatccacacttttcaacagcaacacatttaccaggaaccaatccctttaccacaccccaggaatctgtagctcctcattcctttctattctttgctctacaaagtccaagcatcctttcctaattgttctcacagatacattttctctccactcttagttataaaagaggtctctgaggttttgttgctgtactgtgagcagtatagtgagaagcaccaaagatatgccagaccaagatttggttatctagattcctataagataggtgtatggaattatgtatgaagtcacataagtataaagagatggagttaaagtgcttaaagcaattatcataagagtatgcggcatgctgccaagtatctctctgtgccttctgggtatatctcaaactaaaaaattatcttttaatccaaattcatgttctcataaccaactgacaaacaaggtctattagatagcatctttcataatggatatcaagtgttcacattcattcagagcatcacaattgggtgttgtctctatatagccgaataataatgaagggaccagctccccatttcggcagccataacagccgaactcatatttgtctgaccttgtcttagtcactaaggtcagatgcctgcccctttcggcagccattacacacagtaaaggggcaagtggggataatgacttccaagtcctaacattagactcagtatgtgtacattgacttcactgtggccttgctgttacatggcatcaatctgtgtgacccttgacacttctcatttcaattgtttggttttgggtggactgaagccaactaccacttgaccaaccacttttcacattccacactgctgtcctcagccctaatccccagccccagtgctcatgaattgatttgtttaaaaaaattcttctgatgtagttttagtggatttgtttgacaggggaaaatgagttgagtatgtccaacatgctacttatgcaggtaaagtttaatggaagaatgaggataccacaaacaaaactaaatccaaaattaaaaaaaaatccatcagccaagtgaatgagtaaacatttccctccatccacaaattaaaaacaaaccaggaaactcttggattttcgttagaattacctttatgactcaccatcagtttgggggagttttgaggtggttacagtgtttagttttctcacacaagaacatgaatcatagttgactatgtcttcagttggtttcttaggaagactgtattttataatgatggtatctatgtagtgttatctgtgtttcttatttttcttatgttaattatcttcgtacctcttccttatttgtacctcctgaagcccggtactctagaacaagcaatgttagatgctttagtgatggatcgggtggattttgtgaaactcttgatagagaatggagtgaacctccaccgtttcctcaccataccccggctggaagatctctataatacagtgagtatcatgtcatgttgctcaagatttgtttgctagttagcttcaggtttgtctgcctcctcaaatgctcatgttccatcacagttttcagaatgaagacttactttcaagttaactcacacccttgccatggaatattttatcttaagacagaggcaacagtgtgaataagaaaaaaattgctttttattcagttatttggaatatcttgacctaaagccactattaatatgttcttcttgggtcagtgaggtgcctcactgggtaaaggcactgtggccaaggctgatgaccaaacttgacccttgagacctgcttatccattgtgaaaatgtccactgcctgaattctccttcatgttcctttcaatactgtcctctcttcaagcatcatccaagttctgtcttcatcattgctccagtcacttaacagtgatctctttctagaatttagagcactcccggattcctttcagcacacacgtcttcacactgttggccacgtcttaggatatgcattactcttcatttcctgttattgtgaagaatctcttggatccccaggaagctgggcattgttaagggttcaacaaagtactgactgatagaatgccctcacatgcaaagagatttgattacttgatagaatttatatatgataaaggatagtcataagtgctcaaattttgtgcttcttactacgtaaaagtaacatcttactatttctgtatatacatgctttgaaaactactttgactgatcatggcttctcctgggaaactccctctttaagattaagtagcttaagtctcattaccaaagatgctgaagaagctttccaatgttccggttgcctatgtaatttgaaatacctgtgtaattctgaaacaaggcgcctccagcacacaatagtcaaaggaaatgattcttttttttttctttttttaatcacagaaacaaggaccaactaatatgtttttacgtcatcttgtccaagatgtaaaacaggtaacctaagtataaaagttgaaaatactctttgcctattaccttagagttgagatagttgaatgaaatttataaaatgtaggtttcaattttattgggaattacttactttttaatcacaaaattttattcttctaggttttcacacttcatttctatttttaaagtttggtccatcaactaagtgatacgagttatgaaaaacacagatcagaaggattacatagttcagtgatacagtgctctatgtaagaccttgaattcagttgtcagcaccccagaaacaggccagattgtgggtttcatgcttataattctaggacccaggcggctgaggcatgaggatccaggttttaagggcaacctgggctacatattagactctgtctcaacagaaacaaccaaaataaatgaagacacataagcaatggattctatctatcacacagtcagtgagaacatcagcagcacaggctttttggggatatctagtgtatgatttctgatgttttctgttatcattattttgagtaccagtggcagtgtagggatgcaaacatgcttttgtgtgtctaagttccattgcagggggttaggatggttcaacattcttgctcatgtttttctcagagtgttctcattaaatgttgagtagcacgtgacttgaaaatttaaaggtttttcatttgtcactgtgagaaaaagtcacccacagtacacttgaagaattctctccttttttgaaacttggcatctcactgggtagagtgtggactttctgcttctgttgacttagttggagagtcagttaaaaggaagatatttatttgtcaattttacagtaagaaaaattgtctctgaggatacagatttaaattacattgatttgagccatagcaaaaatgacttgcctaaattatttcctaaatcttcatcacaatatgctgaagagaaagagatggataagttaagtgtgttgccctttgagagcatagaaaaagagatatagaagatattgaagaacaaagttgtgatgccttgatctttgttgtagcatacccttctctcaagctacagaataacgctcatcgatattgggctggtaatagagtacctcattggtggagcctatcgaagcagctacactaggaaaagtttcagagttctctacaacaacctctacagaaagcaacgcaaggtaacatcactgaaaagtgcctcagtgcaaaaatgtggttagaaggctatgaaaataatgattttttttctactgacatgagtcttctnnnnnnnnnnnnnnnnnnnnnnnnnnnnnnnnnnnnnnnnnnnnnnnnnnnnnnnnnnnnnnnnnnnnnnnnnnnnnnnnnnnnnnnnnnnnnnnnnnnnnnnnnnnnnnnnnnnnnnnnnnnnnnnnnnnnnnnnnnnnnnnnnnnnnnnnnnnnnnnnnnnnnnnnnnnnnnnnnnnnnnnnnnnnnnnnnnnnnnnnnnnnnnnnnnnnnnnnnnnnnnnnnnnnnnnnnnnnnnnnnnnnnnnnnnnnnnnnnnnnnnnnnnnnnnnnnnnnnnnnnnnnnnnnnnnnnnnnnnnnnnnnnnnnnnnnnnnnnnnnnnnnnnnnnnnnnnnnnnnnnnnnnnnnnnnnnnnnnnnnnnnnnnnnnnnnnnnnnnnnnnnnnnnnnnnnnnnnnnnnnnnnnnnnnnnnnnnnnnnnnnnnnnnnnnnnnnnnnnnnnnnnnnnnnnnnnnnnnnnnnnnnnnnnnnnnnnnnnnnnnnnnnnnnnnnnnnnnnnnnnnnnnnnnnnnnnnnnnnnnnnnnnnnnnnnnnnnnnnnnnnnnnnnnnnnnnnnnnnnnnnnnnnnnnnnnnnnnnnnnnnnnnnnnnnnnnnnnnnnnnnnnnnnnnnnnnnnnnnnnnnnnnnnnnnnnnnnnnnnnnnnnnnnnnnnnnnnnnnnnnnnnnnnnnnnnnnnnnnnnnnnnnnnnnnnnnnnnnnnnnnnnnnnnnnnnnnnnnnnnnnnnnnnnnnnnnnnnnnnnnnnnnnnnnnnnnnnnnnnnnnnnnnnnnnnnnnnnnnnnnnnnnnnnnnnnnnnnnnnnnnnnnnnnnnnnnnnnnnnnnnnnnnnnnnnnnnnnnnnnnnnnnnnnnnnnnnnnnnnnnnnnnnnnnnnnnnnnnnnnnnnnnnnnnnnnnnnnnnnnnnnnnnnnnnnnnnnnnnnnnnnnnnnnnnnnnnnnnnnnnnnnnnnnnnnnnnnnnnnnnnnnnnnnnnnnnnnnnnnnnnnnacacacacacacacacacacacacacacacacacacacacacacacacacacaatgcatacaaagtaaacagagaggactgaagagatggttcagaggttaagagcacttgctggccttgcaaaggacttggttcatttcacaggcactccccatggcagctcacaaccatctgtaattccagtaccaggaaatctgacactttctccttgcctccatggttatcagacatgcaatggtacacattttgcagtcaggtaaaacctatatgaataaaataagaaacctataacacctttttcttaaatgagaaaggaaagataatgttctgaaagcagacatgctagctttagctcaaggtcactgggaagatcagtcttcaaagagaagaaagaaaggtatagcataaaagtcttgagatttatgatgaagtatagatagatattgatgtgactgggctacaaggcattaccctggcagtggatacaagaatagacaggagtttagtgaaaatgattgtggagacacaagagtagatggatccttatattccttctgtccatcaactttatgcagatgtaatgtctggctttattgttaacaaggaaaatgacagtaacatcaggaattgcttttgcattgcgggaattgtggtggaggcagtgagaacaccagtgatttaacaaagtcccagagcttcacatgcatgggaaactgaacactgccccacttttaaaacccaggcagggaaaaaagtagaaaaagtcacctttaatgtaaatgattattacttaatttacaatgaaattagcactaagaaatctttagaagctaatagaatatcattacctggctaagtcacacaacataaaacctgtaatgcagaaagtctggtgtttttcatgaaggtacttagtccctttgtacagaaaacaataagggacagatttcaactactgtgaactaaccacttttaagttcaaatgcatttctataacaggttttatttttaacagtaaattatagaagttacatgatccagcactatgaaatgatctgattctcctgtctgggaaattgcttagagctgttattcaaacctttgaggacctcctattttatgttagatctcctttttcacttcaaaatgtaactgtgtgctctgattcaaatgttattgaactgcagatacatccccgcatccaaaggcaagacacagcatggggaaagcccatattctcaacattcatccatcacaatttcacaagtaatgttgaaagtagaatcattacccaaagagatggagtcagtgcattggcgatgactggagagagaactatgagtcaacattttatgtcaaccagacctggctatagtacacagttagttattcagaagaacccactaatccaaggatagctgtggagatatttttagacatggttaatgcatgaaatcagttccaataaataaagaatcttggtaggttatagccaagcaactggaggaccccaaatgcacaaagaactaaggattttctgagaaaggcaccagccatccataacagctgcaagctgacctcagaactgcaggctgctctcaagttgtaagctcactttgcaagagcatctgaacatatatacagatatgtaggaaaataacaacaataagaaaaatactctgcataggggcatcactctatctctctactcatagttccctggctggacataatgcaaatcaggctattccattcttatctgctggtattctggtcatttaatgaggaaaaggaaaatgtgtacaatacaagtttctcttcatggctatgactgttacactccactgtgaaaaaaaattctgagaagttggtataattaaaagagaaatgtaaaaatgtctttgttgtttattgaactctgatgccattctaaattctaacagtatccttcctaccttcttccaaatttcaatagtaaccatttgtatggggttcacacatttttatactactcaccagtcctataaagatgttttttaaaggcagaaacaagtattagatatagaaatgtccttagttggtatgaaggaagtaattaactaagagaaagaagccaaagtgaaaacaaaattatggattcaacaaaacaaaattggggaaacttccaaaagaaacccctggcatatcagctggtttacaggtatagttcatttcactctagcaggcgatcacctgttaggcagacaccatgcagagttactgatttgatttgatttgcattctgttaacttgtgtatgaaataatgcctgtatcatctcaggtcatgatccatattgttggaagcagcttttgaattgtccattgcattctcaatttcagtagtttgtctgaggtgacatatttctgaatgaatggtcctcagaattcccatccatggcttaagcctgtctgtggcactcctggtaaagcacagccagagctctgagcaactggtgttctgaaagttggttgaacactgtattaaagctcataactctagatgcctttacaaaagtagtgctcaaaacttttattttacactatcaatggttgataattttcagtagtcttctcattccccaagtctgccttataacaaaagacaggcagctcaacttctaaccacagtaatcatcttctgtctattgaagtcaaacttgataggcaggcagctatggatcatccactagaattttcatttgatggggatactttatctgacattctagaatggaatgatatttactcagtattttatcagacactgagagttcaggggtttccctttcatacttcccataacaattatcattctgtgcagattgtagactgtcaggcggcacacccaaataaatacagatctaaaatacagaaccctgtcctctgcaggagtttaactgtgtttgaaaacagtatgctgtagcccatctaattcaggagaaatgagaattaagggctgcagtgggtgagaaaagtactttcgttataaagaacgtatagcttattaataaaagaaataacaagaactggatataacaaaagagaaggcattataccttaaaaggaaacatgatcacactggtgagaggtcaggaaacagagggacattgctgtcttcatttctccttagtcgtcagggtagttaatactatcatatgtcacagatctcacttaaaatgtttagtggggtcagtttctatcatttaaacatggacatcagcaaaattcactagtgatttcaacaaaaaaaggaaacatcatttttttgcaaattcatggacaatctggtggttttaccttctgacatgaggttagaatatagtgtcttattgctttaatattcttgtgattactcaatgctgcttgtttttattgctgtgaagagacatcatgaccacaacaacttttataaagaaaacatttagttggggtggctcacttgcagattcagaggtgttctttttttgtagactagtactgatggaaccctgaacggactagagcactgcctgagtgcattctgccaggtgacaggggcaggtcagcataatgcctgaatccttacaagaggtccgttgtcatcataatgggtgacatggaaacacatcggcagatgtgttgctggattattagctgagagtcctacatcttacaggcaacaggaagacaactgagacactgggtgttgtcctgagcacaagaaatgtaaaaccctgccctcatagtgatacaggtcctctatgaaggccacacatactccaacaaagccacacctcctaacagtgcactcactatgagactatgggggctaattacattcaaagcaccacaatttaaaaacaatttactggggtgagtagaaaaacaaaagaaacaaacaaaattatacctacaatttgtaaattattcctgtctccatgttgcttcaagactataagcacatgaattctttttttttatttgagattacattagaatcacataatttccccatcccttccatctctctaacacctcccatatttatctccttgctctcttaaatccatggcttccttttttctttttttcatcaattataacataccttcttaaagttatacttcattgggtaatttattccagttgaagaggcatcataactcagatattttttatagaacatcaactgtcagattttggtgcctcagttgtaacaaaactgtaatttatttcatctggataacaaattctaatatcccttgtcctcatctcaaccaactattccttgagcttgactctttataacaccatagtgtgcagcaaattttatttttagtaatttgggccaatataaatgccacttgaaaattatttactgactaagacataatggggttcaaggagaacccacctcatcctctcattgttacacatttgtggcctgtacttgtctccagaacaacagccctgggtgccctgggatccatatgtggacaacagaacacaggctggcacccagcttgctgctatttcgagactcttgtatctgccaagacattaaactaagttttcattttgtgacactttccctaaaggaaattccaaagagagaagataaaaatggataaacttaaggtatgttcactttccaatacagccaggaaagagagggaataaatatctgctctccattagattaatcttgcaattctcaaaattcaaaatggttaccacacactgagtagaggaagtttacagaagtacaaacttatttaaaaacacagaaataatgaaatttgatcacagacatacctaaggttataaataagggacaagtagaaattttcacaaagaataaacttgtgttaggccttgaaggatgagtagatataaatatttaaaaagcaataaactaaatgcagttaaatcccaactgcatagccccgggtctatttgggcctgaatgattgtaggagtctttgaaatatttttaagagagtgctgaatatttatcctaaatataaaagcatgatcaaataaaaatgatctaaacaaagcaatgtggaggatagtctagtgactgattaaccaaaatataatgacttttgtaccttgtccaagtcttggtaaatttattcaacactagtttatgattatacatgctatgaaatgtaattattttcaaaaccatcaatattctagttgataagagactttaaagctttcattctccaatcataaatttgcatactcatgccagtattttaaactccattattgcactcattactgaaatccattaaacaaattcttgtatactaaaaaattaccataaacagaagtttgggatctcattctaactattacttacccttgcggccaattcagcccaggatctctctatccataactataacagaagataagattggaggtaaaaatgttgggttttgccaaatgttttctgcacaatatgaaacagctatttgcagataaagtatatatatacactcataaatgtgtatgtataatactaatacaaaataaacttcatatgtttagttttatcaactatggttacatagataaccaaaatatacatataaatgtataatatatataccactaataattcactttaattctaatccaggttgaatatagttgttactttgccatttcataagagaaacagaaattagtgagagctattagcttcgtggagcttgccttaaacctctgtggagaaacaataggtcaattctacattttaatgtattatctatcaattagcttaacttatgcaaatatcaatcttctgaaaatttgtggaaataagaaattatcactactttcttttttcccattaaaaatttagggaaggttaaatacaaagatgtacaagaatggagtttctactaaaactcaacgcagttttgaaagttaggataaaatttcaaaatctgaaaaggaaagaggccagaaaaggagagagttgaatgaaaatggagaagaggactggtcaatttcctgtgcaggtgctgtgtccttggcatttatcttcatagcaatacagcaaaacctaaattcttgaggacaggaaaaaataaaataatttcctccacaaaatgtaagattgcttttattacccccaaacttttgcacatgcatgactatctctatgtggtctacacatgtgtgtcatagcaagcttgtggaggacaatttgtaagagttaatcctttctaccgtatgtgttctgtggattcactcaagccctcagatgtgtgttctatggattcactcaagccctcagatctggtggttagagtctttacctgccctcatgtatattcttgaagtactgcaagtacagataaaggatctggttaaaattcattaacattgtcattgcttccctttacatcatcagaagtcaccttagtataggccttgcctgcttggctggaactagcaaagggaactgatccaaagaagtttatttcccataacattaataagccaactgatgataaaaaaaaaaaaaaaaaaactgaccaccgggaaaacagtaacaaatctcaacaaacttaagaaaacaatgaagacctgttctcatgggtggcctgaacagcctattggttctcaggaatgacaacatttattctagtgccaaccgtactcattggtagtcttatgtgtgttgtttctgtgacaaccactacagaggcatggctagagagggagaatatgcatgcatataaaaataaaatggtgggctggagagagggatcctgttgagaacaccaactgctttttcaaaagaacagggtttaattatcagtgcccacatggtggcttataactatctgtaattccaagcctaacaagcttaagagattcaacttcctcttctggtcaccatagtgcagagagagagttacattgaggcaaaatacccataagcataaaataaataaattcattaaaaataaaaataagatttctaaaacttagtcactttaaagatttactcctcctccccccccctctctctctctctgtgtgtgtgtgtgtgtgtgtgtgtgtgtgtgtgagtgtatgtgtgtgcattagtatgcttacacacatgtgtgggggtgctgaagaggatgaactgttacactcaaactgtgggtccaaatacacccttacttagtgcttcatgtcagacattttttttctcagcaatgaacaaatagaaggccctttgctgtaataaaaattgaaagaggcagaggaacaaggtgactcacaccagcacctgagagagtgccatacaagtacattttctcacgtgtgcattaaagacacatgctgagcctcataaccatccaacaatcctgcatagcaaatgggggctgccacttgtgcgatttatatttcatggtcatccttgcttcacttacactcctgagctactgcttacaggctctagaattacgtgaatctaaaatttccaagaaaaactgaccttatacaaatgaaaaggcaataaagtctaattcaagagaggatatctttcaaacaacattaaaatttaaaagacaatgcaatttgttagatgtatactgctcattatatctaaagagtcagaaaatactggatcctatagcctaaatatacactactttaatcaaaatttgatttttaaaagttcctggaacctaaaaaactaaaactatattctaaaattaaatattgagtgacctttattcaacaattgtcagctgcatttttctgaggtaacattacactaaaaatatcaactcattctaggtcatgctttcacttaaagaattctcaccaatgcttgagaggaagccctttccttcccttgcccccattctgccatctcctttattctgtccaagttctgttctgagatattaaacttttcttactgctacttaactcttcatactacttagtggattttaacccttctaaagtgatgctaactcatctttctgatttattctctttttggtcttattctctgtcacctgattttgtaaatgttgaccctcttttctccctttgcctgttttattctgtctaccatgtcagaacatatatccatcccaaataaatgcacccaaatttcaaatattccacctaaattacaacaatttttcctaaagctgacaacaaggatatttggagagagtctagaatggacctataaagtctataactaaaatgatgcttaatgaaaacctgtatcataattaattgtttaatggcatcaaaccacataaattattttcttcagtgttatggttttacataaaattttctcaaagaagatattgaaagctgatgaatgataaatgactacaaatctgtaaacttttaatagctggatttctgtgcttgtgtcagacagtaacgtatattaaatcttttcaaaaaataaagtttgaatgttgtctttttcatcctagaagcaaaattgttgacattttatgggaatacacttaagatcccacctcaccaactgggcaggcattagaagagaaaataaggttggaggccttagtacaactactggaggaatagttgcatttagtaaagctaagggtattaacgctgtaataaagtttccctgcatacaattcctcaaaaatggagcatgctaaccttacttctgtaacactggttaagttcaaagctactgtagactgtagaaagtgaagcttagtgacatttgaacctgatttaagagctttgctcatgaccagtgattactcagaataacaaaggcatttaaaagtagatatatccagcacttcatccagttcctttaaaatagttttattattttttgagaatttcatgaatgcaaacaatatattttaatcagaattcagaactgttagagccctgacctgttttatcattagatctttcctctcttcccaaataaacaaaggtcttacttgcatttttaatgtgtagacaacattcaagtgacatagaaagaaaatgagaaaaaaataacagtcaatagagaatgcttctccaagttcagtaggatttataatttacttcttagtccaaattaaatattcaacatgtaccatcctagataaaagtatacactgtcagtggttcaatttttctttttagggtgttgtaaagaataatcaagttataactaaacttgtttaaaaaggtaattccacatatatagcattcatagataagtaatactataatatcttcacttttgaattttatttgattcatgtttagttttctatttgtgtgtgtgtgtggggggggattgcggtgcatgagcccatatgtatgttttcacatttgtggaccaaagagttgtgtctgtatgcttatggtagcctgggtttgacatagacagttatccttggttgttgttctgtcttattaaataatgaagggtctcttaatcaatcccagagctctccaacaaaggtagccttgtgtggtagtttgtatagaaatgtccccaaagactcatacatttgaatgctaatagtgtcaaccctaagtcatgtaactttgttggagtaggtgtagctgtgttggagaaagtgtgtcactaggggtaggctttcaagtttcatattcaccagacaggcccagtgtctctctcttactgtttccttctggcccagatgtaaaactcttagctcatttccagctccatatctgccacacaccaccatacttcccaccatgatatcaatgaactaaaccttggaacctgtaagccaggtcccaattatatgttttcctttagaaaagttgatgtggtcatggtgtcaatgcacagcattagaaacccaaactaacacatcttttggtcagctttctatggtaatccttttcttcacttactagacaggctaccatgcccacccagcatttacataggttctggggatctgaaaatggatctcatacttatgcagaaatcgatttactgaatgatccatatttccaaccacaatataatcatttacaaagcacaaccacatgcagagacatgagttatgtcaggtgattagttctccaaatatccaatgtgcacagtctcacctgaatgtaagagaatgtgagagaaagaagggaatgaaagagatcagtatgcttgcttcacaatgattgcttcactggaagctctgaacacacggtctgttctatgttatggctctcttctccaaccatggacttggtctacatctttactctcacacatgtaacatctccttcctttctctctcactccccatctatctcatttaattatattcatataaatatacatgtttatacagggatattatgtctatatacctgtgtgtatatgtgcacatgcctttaaacagtatcataacattgtaaagattgtcaagttgtagaaatagtttttgcttcacatactccaggtcagggattgtgaagcatccttccagaatcttgccttatccttcatttggtattatcaaaatgtaagttttaatgccatttccttcacactatattctatcaagactcttgccatttatactaaatgtaataactctcttctactcaagcatcttgagtttgagagtcaacatatttcatatttcaggttgtagtgttgcctggaatgtgtcacatagacctaagactttcaaatatccatgttggaattgatagtacagatattgatatttaaaccacacaaatatatcgccaaacaaaaagactaaccaagtcatatgcctagtccaaaatataagttgaaggcacagattgattttatacattaatttggataattgtgagaaagtgctatattgattacagaagagattatttatttattttaacttcaaatgtaatgggcattttattatataaattgatgtgtttagcttgtcaaattgaaagttgtatttttgaaagtaatctataagagaattaataggggctggcaaatagttgagtgattaagtcatttgctgctcaatcctgaagattagagttcagttcccagcacccaccttgcctgtcaaaaatgccagtcactccagcttcactggatccaacactgcttctgacctccacatacatacatgtgaacataaactcacacaggaacaaacacatacacaaacacacaaacataaattatataaaaatgaagaaaaatactagaagatgtagatatagtaaataattttgttccagaaacttatatgttataaacaaagccccaggaaaactcaaaaattaagacacagaaaactttgttttgagtaaagctttctacattaaaaagagaaataaaaatctgtttcactttattaatagtaattcatagtacagtttcacctttaggtaatgtctattctagggttgcctttttatattgaactagtgaccaagcaattgactaacatcttatattgaattaatttgaacccagagccctaagagacaggaatcactaatttacaccttaaaaattgacagttactgatctatttcttatggttcattaaaattatatgttaagctcagtaattaaaccatataaattttaccatccacgtttgcgtctctattttgaccacgtaaggcaaaagtcacagcttcccatttaattcctctaattaataaactcgatttccccttcagctgttgatggcctgctttgtgctatttctctaagtttctgtctcacactttgcctccgacctatttccatgaagcctagatggtttgggcaatgtgccaagatttccccagtttttacaaacacattaaaatcacattaaagtcccttctgaaaatctctctctgtgtaccactgtgacacagtggcatctccatgcaactgcatacacatacttttagtgcctctcattttaactaccctgtttatttcggtggcagcctctccaggttcactttctgcatgttccaaggtatgtcccacacagagctgtagaacagagctgcaggaagtctcacacccacaccacagacttcctgtacactggagaacacaggaccaggacatcataggatgacatatctgttttatccccagtaatgtatttgttacatcggttttcttgtattttagcctgcaatagacttcttaccattttccacatcaaatatattgcctgtaattttctctcaccaaatcctaacctactaattaatttagtagcagaaatcagaatttctccccagtaatttccattcttcttattactctccacctttttagctctccatttccaagctcaactgaaaagaggatacttctctcttgcatgacttttattttgtcctcttcttcactttaatataatttccaagtaaacctcattgacgcactgaatactgtcttatgatgtgtgtctaaaaggactgataacacatgtatcacagatgtaagaggtagattctgtctgtctctgtgttagaatggctccaaaatattgtggcttctaatggaacaacgaggagttggggcagtaatattagttatgcactgactagacagatttcttctctaaacatctatatctttgatatatatatggtgtgcccatattatttacaatccaagtaaacagaattttaaaacacatttaaactattatctcttcaagtctcatgatataggtgctattatcagtctcacgtttccaaaacataaaatgactttgacaatctgagcatctagtcttattgtgcatagctaacagcaactcaaagagattgcaatcaaatctacctattctaatatcaaaattctcattgcagagtcatcttataaagctgcatgaagatattatattttcagtggttctgaaaagattaatagggtgattattggaaacagagactttccaaagttccttctaaatttaagtagtaaaatttgtttttactatggagaacatactgcaaaatccttgaaccacaaatttttttaatcacaaattccattctgtagttaagattttcatgtcaataaaaattaactttggagtatatagcattaaataattcacttatacaaaaaaataactatttttatttcagagtccaggagaggtgctagacatggtataagcataacatacacaggagggaaataatgtatgttttgttcatgtccagactgacagataaacaggaaaagaatcaatggatctttttttatcaataaaagatactggaaatgatgtagacaacaaaactcaaaaataatttcaagtaaattctgaacatgtggtaagatgatttgtgaattttgtaaatagtgagatataaagaagatataattacatagtttcatgagagggaattctagttcagaaaagactagacttcagtacattactgatgattttgggtccaagagtagtcatgcgtgtctatggtagttcattctcattagcaacttgactggatttaaatcacctagaagacatccctgtagatgccagtgaggatatttctggagaggtttagctgaggagtacgctgaaagtggacagtgccatcttatgcattgcatattggacttaattaaaaggaacaaaggaagaagacaatttgagcacttatattcatctctctctctctctttctctctctctctctctctctctctctctctctctgtgtgtgtgtgtgtgtgtgtgtgtgtgtgtgtgtgtgtgtgtgtgtgtgatatctgaaggtgtaacacaaacagctgtctcacaagcctgctagtataggcagaactactactgaaatcttgtcttccattattcaatgggctatgtgctaaaagatgagccaaaatggcctttatttcttctgttgatttagaccagcaatcagtcacagcaacaagacaggtaactgatacatatcatgtagtaaacagtaaaggaaagccaccaaatgtggaggcatgaatatccatacccaaaagatcaccatattgcttgaacatctatacatacctgtttccaacacagtactgcccacctgatgtcttctttcagaaacaaagctaacctccgtatctccagaaacatatgtccatacatccttgtacacctttctgtttccagcaaaacttatttgttccactgaatgtcagaaagttggagtctgtactggcttatactattatacacaatccatgatgcttaataaggattgtcagcttgataggatgtagaatcacctaaaccctgaccatacgtgaggtaatttttagggtgaattaatgaagatgggaagacattctacataagagtggaccagactatgatctggagacatggactgaatgaaaaggagagggtgagctgagtattagcaatcgtctttcttcctcactgtagatgcaatgtgaccttaagttgctgctttcacgacttccctgccataggggactagctccatgagttgtgagtcaaaataaaccctttcttatgttatttatgggtattttgttgcagcagcagaaacatagctaatatataatccacaaaagacattcacatcacatcttgtgatttcagtaagaaaatccccaccaacccttaactattctgagcacacgtattgatcttagggattgactaggcattaccattgctgtagtttacagtacctatagctatgagggaaaatttagaaaaatgagacttgtgcaaacacattcttgcaaagaaagacaaaccaagtttgagtgacctgaaagtcagtcccttgaccttttgatgtatttaatcttttcattcaggtttctgcccactggtctcaggatattatgaattcaatgaggaaatagcaattgccctttatgagatgcacagttgttttaagttgtaatgctctggacactttaagagagcttttcactatagagacatgattccctaatatgagaataaagcatttttccatctaaagcctgttctaaaggtttggacttcagagctttggaaactttgccttgtctaaagcttactctggtaatctctcacaggtgcctgaacctttctgctcagctgggaaggtctctattttgtgcgactcttccatgattcaccccattcacctgaaaccttttcattaaatcagtgcctcttgcagtgaaatttgatgctggcttctgcctttgttgtctaggtctggagcctggaaacctattcatcattttcatttgctaaggaggctggagtgcaggatggatggcttgagagcttcttgttttgtaatgattatctagtgtggactgggggaaagcattttagtctttaatttttccagacgttattccattgtgctgtggagtatgccacagggacccatcctttgcagccagtgagtgaatgagatgaccttaatgggcctcctgcacatctcccatctaggactccttaattcaattatccttgggcacgagaagagccttccatcaccactcctcaaatgactaactaccagcattactttctttcttaaagcctatatgatattttcaggtttttgctcttacttgacattctggttcacacctcctagctgtcattgagtgtgtgtaatttcttaattttattttagatttatttattttattttatgagtgtaagtgtgttgtttgcctatatctgtatgtaccatgtatgtgcctccacaggaacatggtggtcagggaaggatttccctgagactggagttacaagtggtgtgagccacccgctcagggtacagcaagtgtgcttcacttcaggagccatccagccccattgagagcatttcatccatgtctgaacatgtctgaagatcctaagtacagctatgaagaagtttcatgaaatgcctctctgacacatgtgtacctgtttataacaggtgtaggaataagagccattcttgctgcatgtttatccaggttaataacccaaacatagaagctgatcaagttatatgtataatttttacatattattatgcttctgctattagctaaaattcaactttcctgtctgacgatagtttatcatcttgaataaacaaaaccctaagaaaaaatttccttgtattcctttttttctttgtggggatccacagtggtgatgtgaggtacataattttggataaaatgagaaaaatttaatggaaaaataagtgaattgattgactcatacagtatttctctgggtaatggagtatacacattcctcgctgtgtctaggatttgatttgtcgagtttgccagctccaaatatgcagtctggggtgttgctgacttttagaaagacttgttactcttgtcatgacaactgacttcaagagcaattcaaatgtatgtagactttaaataaaatggtttctacacagatggcaaatgcatacaatactaatttttaaattctaaacaaatcaattcaagtaggctttttgcaccattctagaagatgatgtgttttaggcagataattcaactaatgataactatcctccatgcctttccttttattaatgtgatacccccaaacaacaaacaaaacaaacaataatctggtaggagacatgcagcttggtacaataaacaactggtgtgtaaaactgcctgattcaaagactctctgatgtcaaggtttgaatgtgaaatgccctccacaatcttatgtatcaaactctgttccccagtggtagagtaattttaggatgtgtaccacctttacaatatggtgcctggatgatgtgagcaggccactttgggcaggacttggaaagttatacctgtctctagttctggtctagctttctccacttctcatatttccatggcataaagaagccaagctgaaatccaactctcactatgtagaccaaactaaacagaccatgatagcctctccagctaccataaagtgctacatctgtaaattgtgacttaatagaatgttcaccttgggattcttcctttgagagttttgtcacagtgatgatcaaaacaaataatataacagttttcctttcctaccccaaagcacaaggtctaactctagtagacaataggtcaaaactgcagttttgtttctcccttacacagctcaatatgcatgaaaaatagctctgcagtgaaaacttacaaaggtcaataccaatgctgacctcatttaggtaaaatcacgggttgaatcaggattgctgaattaagagcttgtgctctgtgataaattctatgatgctagagtatcctagtaacatttagtttacccatggtaagagggaagttggagccacaaccttggtattttattattagtgcatgagaccatgaaagcagattgactaagaacagaggatcaatgaccattttcattacctaatgcacacagaagatggttgagtgcaactaaatttttccattgttttgggaacatttgcttaaacacatgtttttcggtgtatctctcgtccatgctaaatatacacatactcctaaatataaagccatagtccatgatgtatctagctatgggacattatttggtctcccagatgtgacacactcttgtttatgtgtctgtttgaatcctccactttcctggcacatcctttggttggataattcctagtgccttctaaacaaattccattttaagaaccttctcattttgaccctgcatgggatttattagaagtccattttctgatatgtcattggtatagtatctctttatttacaatactaattttcaaagatgtgtttgtgcctatttccaagtactctgttaaaaaattacacactaatttaaaattttgttcagaaactttcatgtatttttgagactgaatatttgaaacaataaatgaagcatataaaattattttttaggagatgccttcatagagggagacagtacaggtttggagagaggtctgccacagggaaaatgttaggggattcacagggatgaccccaactaagaatccaagcagttgttgagaaaatgccattgatgcccttcccctataatgagattgatgcaacccttggttaccattcctagagctttcatccagtagctgttagaagcagaaacagtcacccacagttaagcactgaacgatactactggaatccatttgtggagagggaggagggatgagcaaaggagccaagacagggctggagaaaccagcagaaacagtggaccttccctactgatagcatggagatcctagtcataaagctggggaaacaacattggaccaaaccaagccctctgaatgcgggtgtcatctaggaggccaagacagtgtatgaacctctaacagtggatccagtctttatccctatagcacaaatggatattgggggcccattccttatggaagaatactattgcagcccagatacagcaaggccctccacaaaattctatggtggactttgaagggaggacctcactatcactggggaggagttgaggggtgggtttggggagttggtggggaacatgggagaatgggaatgctagggaatgagagggtggatatgtaaatatgagtagtaattaaatattaaaagaaaaaaattaaaagaatattaccaaatattatcatataaaaagtacatacaggttctagcgatgtatgaaaaaatcaaagctcagtatagggaacttctgtacttttcagcttcttggatatttgaataattgtatttaatttaaagaatcactgtgctttgggtttttttgtttgtttgctttgagaaaaccctgtaaattttacaatctggactgcatcatcactgtgcagagaaaaacaaagattcaagacttatgtcaaagaaaattgtactctttataatttcctaaatcatcagagtttgttttattttgaatagtgtgtgtgtgtgtgtgtgtgtgtgtgtgtgtgtgtgtgtgtgtgtgtgtgtatgtgtgtctgtgtctgtgtctaggtttgtgcacatgagagcaagtgcccatgatgaccaaaagatgtcatccaagagatcccttggagctggaggtggttagttttaaggtagaatgtaggtgatggaaatagaactcatcctccttgagagcagaacatctcttaggttctgtgccactttctatccctagtttatatgatcctactaataaagaaaagctgaagaaatgttgatactagatattaaacgatattaatataactaatctatggctatagtatagagatggagggaaaccatgatcttacaagatgaactactgattcctgcaagaaaacagaagtagagattgacatgaaagccagtggaaaatatcagctgaagaaaaatgagtgaaagtaattgatactcattggaatatacatggggatagatgattattatgagtaatgcaaacagatatatttttacctcttaaatcacaagtaaatccatattaattacctttggattgaaagtttacaaggaaggagttagtcaaaaaatgtttaataccctctaaagaagggaatgatatgcatgaatctgaaagaaacatgtcacacaaaagaaagtcattttgaaatcagaattgagactatggccacagaaagtaagagacacatgtaaaacaagacctctgcaaggccaatgatattgaatgtcaaagagaagagcttccttatcatacaatttaatgtggatgcagaggaaacaaaattcataccatgtaccatgattacagaatttcactgtcataacttcatgactatcacaggaaagacatacattctgtattgtaacaaaggaaaagtcagacaccatgtctgagttacctcacagcttaaatgtgtatttgatcattatctcggtgtttgagagcaagatgacagctatttccaacctaatggactatgtgcccataactgctgccctgctttgctgttattaatatcacagatcttgacaagttgacaagatatatttaagtttacattcttttctcacaaattaaattttatgtttatgggtggtttgcctttttttttattttgcttgaaacttatttcaaaacccagtgtaagcattctttagaagcatggtaaacaataacaaagccctcctgaatatgcagatgtattatttcaactttgtagtctaaccctttctaagtcaaattaatatgaataactacatattgaatcaaagtaacctgcttcacacaccttgtatttcctagtggtctaactactcttcagttcatgtgataaaaaattctgaggaatgtattggaaggaaggatttatttttgcttcactgtttcaaaagagatagaataaatacatcatgataaaaaaaaacataacaacaggcatgggaagcatgccacaggtgccacaagtgactgattactttttcataagcacatgaccaggcgagaggaagagaggaagggagaggggggaaaaagagacaaaatcatggagaggctataaaccctcaaatcttaccaccagtgatgtacttgaaacaagactctacctcctaaagactccataaccttcacaacagagctaccaacttgaaaccaagtattcaggtacacgagcctcttgtgacatttgtgcttcaaaccaccaaggctatggtttgcatatatgctccccaaagagcagtgttgagaatgtggtcatcagtttataaaccagtgatgatggaaagaacctatgcacttagaatcatcccagatcatgaagactgatattcatcatagcatgagtagctttacnnnnnnnnnnnnnnnnnnnnnnnnnnnnnnnnnnnnnnnnnnnnntacacactggaaactagttctactatctatgcctttggactggccagaagcagggacaaagttccactacttccaaggtattaggtctcttgtattttgtcacaccattagacaataggttatattttcagaggagttgatgataagttctatttgttttattgtgggtgttccaactgctatggtgtcatagtacatataacagagagaaatatattcatggaatcagggctggaaagaaagactcccatgcttgtttctattcttaccttcccgtgactcctgtaaataaaagtcaataatatgtatgaaaattatttttagttgagtttgcctaaaacttatttcaatgcccactataagcattctttagaaccacatcgaactataacatgggagaaatatgtgtaccagagtaatgtggttgaagacatttctagatgacaagattacactgtcatgtcagacatgatgtcactactatggttaatatataggtagaaaactgacctggtgtctttcattagaacacaaagtagtggcacacaactgatttacagacccagatgtcagaggtgtctgtgtaaagaaggtcttattgtctgagaataaattgttttgttgcagagaataattttttctctgcaaatttattcatacagttttagttatacatgtactatgattatacttatgatggtgtaatattctatggaagaattagaatgcaacctgatcacttcttttcttgttgagaatagggcaatgcttcatattacagtctcttcttactttcagagaccctagttttgaacctaggaagactctctgaacccatgtcacatgccaccccaattcacctgacctcagcctatacacactccagagaagagtaggttcatgtttatctgtcatcacattcctgccagtggattaacaagggttctcttaactctagtattcctcaaatctgtgtctaggtgcgagaaaacctgctgatgacagtttccagaatgaaaagatacaaaaagctaaaaatgagctaaaataattctataattttggagaaaatactccacatataaataatctggtaaagagtgaaaacatcaagaaaatcaacaaacttaaaggtgcttttatttaattatgtgtttcaaacttccaacattttttgatctatatgtattgtaatataaaacagaatgtttcccaagtaggaatttaagttttctgatggcctgggaagatggctcaacacataaaggcatgtgttgcaaagtctaaagacctgaattctatatccaagaatcacgtggtatataaaaagaaaactaactcccctacttgttctctgatcccttcatacatgccattgcatgtacatgtccacaaacatatataataaataaaatgtaaaactcaaaagctgttagaatatggggcaatattcaattactgacaactttaggattcttaaaatacatgccaattgatatagaactgtcattcaataaaaagttgtgtgtgcctgatgttgtaccatgaagttgagcaacaggtggtaaaatgtttacaaaacagagaacagcttgatgttgaagcacaaatagttactgtcattattactaaattatgaccatagaatcaaaattaaaattaaccagcaagtgccatatgtaggcatatttgtatttgaacacagcattaacccacagaagatcttaaagtattcctacatttttgtctttagtataccaattgtgcctgtccctggacattccactgttccattataaataggaattactgcagagcttaaactaaaaattattttatgttgttgctttagaataaatctcacctggtgtagaattacagcttgaactgccatacattttaacctcactgattggatattctttgttaatttaaacaattctaaaatctctaaagtgtcaaaccacacacatatcaaatatcccttaaaaccacttaaacatttttctctttactgatggagtaaacatcatattttggagaatttcacagtctcatttaccttggatgttggctcacttcattcttgccttttggaggcaataatgacactgcctgaggcttctggcaatcctttctctttttctgtgtgtgtgagcacaggaactgactaccatataaaactctgatgtgcatccaaacctttcctccaacccacagatgccacacaattccagttattagtgttgcttaatgtcattttctaccttatttttaagttctttatgtcagggagtggaatgatggcttggtgtttaggagtgcttactgcttggtggtaaagggtgattactgatgttccaaagtacctgagttcagtttctagcacccacattgagtgtatcaccatcaccttcacgtgaaccccaggagatgattcagcatccttttctggcctcctctggtacccacacatacatgtctcacctcaacatacacacattttaaaatgaacaaattaagcctttataaaaagttctcctagaggacgattgttggctttgttgtagtaacacatcagaaatctctcagtgtttctgaatacaagttttgcttcattcttaattctccaagacattctttgttatccttgcgtaagtctgaagtaattacagtagagaccttcatcattctgcaccccaaatcctgacacccagtaggaacccatgtgctgaaaacaatgaaatgtcagctgaaaagcagtcctaggtaatgcctccccccattccacacttcttttaacttaaggggaagccagaattgaatgaattaaggctacaattattacaaagctaggtcagttctatcccaggtttaaaattgttttcagtgacacatgttgtatttcaccagtattaccccctgagaatctgacgtttgggtacaagttgctataggagattgcagacaggagtgttgggatttgagatccaggacaaagtcataaccagcacaagacagtaagcaggtacaaagaggccaaacataacccagggtgtttgggttcccacagagatgatacacaggcaaatctagaaatcactaaactcaatctatggaatctgtaggaaacaaatcactaacaacatattctaggaagtatgtttaaaagtaaaaacaaaaaacaaaaaaacaaaaaacaaagcccagagttcttagcaacagccagggttgtttggatatttccatgggatcctcttggccaacttaatttaaggcaatgcagtcccaggtgaggctccatattgcccatcactgggagtcctcattagggttatctccatatattccagatttccactgcactacattttcacatcatccccaaatgccccccaattccagccatctctctttccaccccatctcccccaacacctgattgctcccatctgccgacactcccagtctgcccataaaatctattccatttgtccctcccaaggagatccctgtgcccctacctgggcccctcctctttacataaattctctggatctacagaccgtagcttggttatcattgacttaatgactaatgtccacttacaagcaaacacataccctatttatctttctgggtctgggtctcacgaagattttatttttcctagttccatccacttgcctgagaatttcatgatgttattttaataacagctgagtaataattccattttataaatgtaccacattttctttatccatttcttaattaagagacatctaagttgtttataggttctggcttttatgaataaagctacaacaaacatgattgagcaagtgtccttgtgctagaatggagtgtcctttggatatatccccaagagtggtactgttaaatcctgaggaaaattatttcccaacattctgaggaaatgacatattgaattccatagagtatatacaaatttacactcccaccagcaatggaagtgtgttcctcttactccacattcttgccagcatgagctgtcacttgtgttactgatcctagcaattctgacacgtgtaagatggaattacaaagtagtttgtttgggatttccctgatagctaagaatgatatccattttttaatgtttcttgggcatttgacattcatctggtgagaattctctgttgaaatctataccccatttttaaattgaattatttgttttttgatatctagtttcttgagttctttatatattttgggtattaggcgtctgtcagatgtggagttggtaaaaatctttcccattccgtaggctgcaagtgtccttgccttacagaagcatttcagtttcacgagatcttacttgttatatgttgatcttagcgcctgtgctatctttgttctgtcgtcaagaagtcatcttttgtgccaatgtgttcaaggctatttcccactttctcttctatcaggttcagtgtatcttgttttatgttgaggtatttgatctacttggactgaatattctgcagggtgataaatatggatctatttgcattattctacatgtcaaatgacatctagtatgaccaccatcatttgttgaagatgctgtcttttttctagagtgtatctggactttttaaaataaaaaatcagggtttagataagctgtgatttatgtcttgctcttcaatttggtttccttgattagcatgtctgtctttatgtcaataccatgttttttttttattgtcctagcttgtaatacatcttgaaatagggagtggtgagaactcgagcagttcttttattgttaaagattgttttagctatccttcagttagttggacattgtctttcaagttctataagaattgtgttggaattgtgatagatatttcaatgtctgatttgacttaagacccacttccaagaagaaagccataccatacactgctttggtaaccaagaatcagagactagataccccagacacctaggggaaaccacactttactggtcccccaaaacaacaacaacaacaaaaacaaaaagagtatcgataaaatgactcatgatattctgctttatccatagatcagtatcttatccaggcttcataatagaggcttcctccagcagctggcagcagataggaacagatgcacagacccaaagtcagacattattcagagagagagagaaacacacacacacacacacacacacacacacacacacacacagagagagagagagagagagagagagagaacccaaatgggaggtccccataaaatctctcccctcagaactcaaaaaatcctgtagaataggaagcagaaagattgttagaggcagaggagatggaagacactaggagagcaaggctcttttaataaaatgggcaaaatacatatgaactcacacagactgaagcaacaagcacagaacctacatgggtctataccaggtttttattttgtcatgttttgtggttatctattagaagcctgttcttttttaatgagagacagaaatggatctggatgggaggagagatggggagaaactgggaggagaagagtaaggggagactataatcaggatatattgtatgagaaaatctatgttcaatatgaggaaaaaataaaaaaacatatataaaagtaaaagggaaaggaagctaccaaaaataccatgaaagactatattgaactaaagtttatgggtattagtggagttaggaaagagcatggaggatggagcagagtgtggttggtcagaggcaagttttaaatattttttctcccattgccaccacggtgctcccatgtcattataggaaccagttatgctggaccaaggaattccttgatgcaagaacagatcaaatgttcacaggataaaggagccagtgacatggatgggaagtgactacttgaacatagctgcttatttatctgttctcatcttcccttatgaacactgaagacttcatttagctttgaaactatttccttgttgcctatgtgctgttgcatgaacaatgagggcagatgagtagggaaggtaaaacttcaactgttagtgtagtgtgcacaagggcatcaccaagagagggcttattcaaagccaatatgagaaaagagctgagacttaatctgttgtcaaatgagagagacttgaggttgaactaaatcagaaagaggaaattcggccactgtcatgcgtgcttgcaatgtaaatacatcccaggctgatgcaagaggattgctgtgagatcaaaatcatcctgagatcctgtcatagtaaatcagagaacaacatgaacctaacacaaagcagaataacttaaattcagacagacttatgattaatattttaaggtttcaaaacaatttagaaaattctatatatttctcagagaaaattctgtttgtcattaaagaccaaatgttatactggaaagatagtgatcattacaggagtaacctaagagctggtggatagcaaacacttcagtcgtgtcatgattgacaggtgaaaacctactgatttttccatattaaatgtgtatacttatttacatgtcagtcatcctcaataaagtgacttctaaaataaaagaatcagggacagagagatagctcagttgtaaaagattcctgcctccagactgactacttgagtttgatttctaggactcaaaagacagatgaagagaactaactcctgtaagatatactctgacttcaacacatatgtcatggcacatgtatgtacacacacacacacacacacacacacacacacacacacacacacacacacacaccagtatttttaaacaacaaaaagatctagaaacccacgatttgttcattataacacatttgaaagttctagaaatgaagaagaaatgaaggcctgaaaagcatttctcctaattctaacatcaaataactctacataacactcagttgtaattccttccagggtttccaagcatcatgttcaggaatctaacacttaacaataagcacgatcttcaaaacacattctttactttgtgattaatcattctctcattatatatatgcttaactcttttctgaatgtcaaaattatcattgagtattaatgtgttagcctttggcttattcttagagtttgtattttggaagtgaaaaatgctatgaaatctgttgatattcattgtcaaacaagtttccaaaaggattccactgatttacatttccattaacatatatacaaatatcttctttttaccttcatttactatattcatcagtatttgtgctggctgagttaatgtcaagacacaaactaatgtcatcagataagagggagactcagttgagaaaatgctacataagatcaggctgtaggcaagccgggaggacattttcctcattagtgatagatggaggagggtgccaccctgggccagtggtcctctgttgtagaagaaagtaggatggacaagtgctgaggagcaagccagtaagcaccaccctttctagtcatttgcatcagctcctgcctcttggatcctgctctgtttgacttcctgttctggattccttcaatgataaacagtgatgaagaaatataaaccaaataaaccctttcctccccaagttgctttggtcatggtgtttcatctcagcaataaccccaactaggaaagaatttcaccagccaaaaatcagcaacaatgtcagtattctgaatttagtcaccacaccaaactttgtttctgatcactgttgtgttgtgaacacatcctatgaccatcttgcaatttatagtcattttaattcgataaagtatgacttaaatcaatgatgtcaagatttagaaataacacatagttcatgctcttggccatatttgtggttgcgtccttgtggctctattgatttctgattaccagtaaaatttattataaatttaaggaaaacaacatggtattttgatggagaagaactacgattaagctaattaatatacctattattttatggctagcttggatatttgcattgtacacaacagaacacagtaaagactattgggttattgtttattgctgtgatgtgaactgttaattaaacaatgtcttccactttgctggccacagatagtgcagctgggcttctcagggtgtaacctaaagcccagtcatcagcacatcagaagcacagtgggccaccctagacttcctgttgaccgaatgctttcaaaggattactgcatttctcacagttactgaagatttagaaaggcgatgagtacagtcctagttgctgaagccagtaagaagaggaaaatctccaggtgaggagcaatgaccatggtgctggtgaaccatgattggatctgacagtgttttgaatttacatttgatggactgtgataattggatagagtcaatacaagtagtaaaagcaacataagatttgtatgttaacatcacctttcctttccctgccccccaaaatggcaggaaataaggtgcaagggttagaggcctttttttaaatcaaataataaaaatgtgtgcttgtgttatgagaaactgggtagagtttgggttgtatttatgacctttccttttccctttgctcaagtcaatttacagttgtaccatcattcaccttcattgttttggaagaataatttgtgcctgaggtggtctattattcaaccacctctcacagaaaagtctcatgtcagattactaacatccagtttagaatggaaatatttatttctgttatattagcctgctcatgacttgacttttcatattcctgtgtagacagaataacaagggccaggatgatgatgtgaggctgggtgtgaagaaggaggagagatcagacattgtcctctgcaaaatgacttcataattagagagatttcacagaaagagttgtgcccaacccacttttaacaccagctgcaatgacgctcctcttactccatgtcctcttcaaaattctaactacaagtgttgtttccttggctgtgaaattggaaccaacctgactcttccccatatatgaagaagaacaatggcaagacaggtaagtacagctgtcagacaggcagtgcttgaatatgagaagagggaagagaataaatgagccatttgaccattgaatagaatgatttctccactccattttaggtttacagagaaatcaggcagtagggannnnnnnnnnnnnnaaaggtctggatatctacaaagatgacaccagctaacaatctaagcaacagagaagaggctaccttaaatgccctcctctgataatgagattgatgactgtcttatatgctatccttaagccttcatccagcagcttgaggaagtagaagcagacacccacaacttatcactgaactgatctggaattcagttgcaaagaagaatgagtgatgagcaaagaggtccagaccaggctggtgaaacacccagaaccgatatgaaaccctatcccaaagaatatgacagactctgatgacaccctatggaaggcctcaccctccccagggagcagaaaggatatgtgataggtagggttttaggaggaggggaaggagtgggaactgggaatgatgtataaaacaatcttgtttctaattcaaataaaaaaagatggaaaaaataaaaaagaatgatttctccactcatgataaagttacatcgaaataaactcattgcaatgccaagatattctcaacttaaaagatttaattttactaaactagggagcaccacagtgaaacagaagagtgggatccacctctccccaatgaaatgggtatatcaatcattatcaaacactgttagaatctgtggaaacattgacagcattaatgagaatatccttattttcttattagagcaaatactgcttctactgttcacttcctggcaaattacaaaaagatttggaaaatgggcaatttcactccccaattaacaatcttactctccctttcttcctgactactgtgagatgacagaccatctctcaattactagccagctagactttgttcatggcaacaacagctaccctaaataatctaggcaagcataaggaaaccacacacaaccgcagctgcttgtacaagttactgaagggacagtcttagctagggtgctttcaaaccggttttaacaggctgcttgctatcacaagcctacatggacctagatgacgctgcaaccattccacctagtgccgttcacaagtaattttcttggggccctggtagagggactgctgtgcttggtacaacagaaacatccatttatatgtggtgcccccatgattggtgcaaatatccttcttccaactatttaaggagactggggataacacctactgtgctagctcagaaacactcacctgtgctagcttgtgtggagctgtgacactggtcccaagaacaatttcttctaacccagtctttcttacctgcttttcacagtacaaattcagttgatagcatgaagaaacaacagagacagctgagtggcagtggtggccaagcagccaccaggctaagctgaaaaggttgaaaagcaacaattttcccagcagctaagcagtcatcaagggcagtagaggcaggaagggagggcatcaggagtgaatgaagagctgaggctgaggatggataaatggctacagaggagaagagagaagctgcagcttctgctgattgagagagtcaagactggaggccagaaatttcagttatcccatgctcaggagctgtgactatggacactgtcaagggcagggtgaccctgtatctatgcatgcatattccaaagctgcagtgccaattgctgccaagaactaaggaattctgtccccaggtgtttcctcaagagatgtaaggttaatgctgagcaatgatgccacatgcctttaatcccagcaatagggaggcagaggcaacaggatctttgtgagttcaaggccagcctaatctacagagtgagttcctggacaggctccaaagtcacagagaaacactgtctcaaaaaccagaaagagagagagagagagagagagagagagagagagagagagagagacagagagagacagagagacagagacagatagagacagagacagagagacagagagagacagagagagacagagagacagagacagacagagacagacagagagacagagagacagggagagacagagacagacagagagacagagagagagatatatggctagcaaacctatgagttcagaggcctggacacggtttgttacagaggacagtagctgttcctgcctgcctttactgctataaagcaatgaaggattcaaaaggtgctggagacccacatgcacactgggagggcttcttatcctgtgatggcacctgggtagagcaagatccctgtctaccaactagcaagaatacaacagataggaaagcaagatacatgaatgctcttagccaattgtctgcatcagggcaagctatcctgaaaggtgtgagacattcaaatgcacacttatagaaatatgggggctacacaaatgtgcacaaatattcacaatatcctccctcagaacccaaacagcaaatgatccaaatgcagacaagcaagtagatggttgatttacgcatatgcttacagtgaagtgttacttatgatcgcaatttgaggcatagcatgtagccagatgcacgagtctcagcaagaaacacaagacagtgaactacctaattccaactcaagaaattctcaagcatccagctccaatcacagagataggaattcatcagtgaccgattgggctgaggactgcaggcaactcatttaaaaaagaatggaagagccaggcagtggtggtgcacacctttatcccagcactcaggaggcagaggcagggggatctctgtgagttcaagaccagcctggtctacaagaggtagttctaggacagtctccaaagccacagagaaaccctgtctcaaaaaaaccaaaaaacaaaacaaaacaaaacaaaaaaacagaaaaaggaagaaaactctctctagctgtgtagttgtgaaatactgaaataataattaatagcacaaacatatgtgttcatgcattctatgatggctattctgggatgtcaacttgaatacatctgaaattaactaagaacaaagcatctgggtaaccctgtagagagctattcttaattaaatcttttgatgtaggaagatccaactttattctatgccacatctggtggcagcctttacaaaggacatggaagatgaaagctctctgtttttgcttgcttatcctcactcctccagcaagccctttttttcactggcatgaaaacctagttcttcaggattctgacatatactgaagactagctgacacatccagcttcatggactgaacaaccactggattcttggactttctattgctagacagccagacagccattactggattagatgcatcacagcctgcaagccactctagtatatcccacatatgtaatatatatgttatatatgtgtgttaataaaccatggaacttaatagattcaacagaacatgcatttatgaatatatgtgaatatatgtgtatattcagttgtgttcctctagaggaccctgactaatacatatccatgcatctgtcaagctttgctctaaattgattatattttaggaatgtaaactgtagctctattcatttctacatagttttattagctgtttgaagattcccagaataagaacaacttgtgtttttactaactaataaatgaatatgctacttgtgggtacttctcacatcagccttctaaaatgagtattcttaatgcatatcaccattattaactatagatataaaatgtcgagactcaatgatattagtcactaatatcatcacagattctctgtgagccaaaatgataagatgtcaattttaacccctctacattttcgtaatactcaatacttctgtaacaataaaaattcaggaaatcctcctcaatgtaatctaaatggttgtgcatggcacaaaaagaaaattgcatctgatatcctaaaatgcttataattatgttgatcctcagtcttgtaatttaagtaacccactatgcagttacataaagaacaatgcagaaactggtgaattgatgaagctctattccccttctgagatgtgcattaataaattcataatgtagctattttgaacttctgtctcatcagcaatttctcagactctttaatacactaaagagacttacaaaggtaatagaaataaaatggattttcagaggagatttggagatagttaaaaccattgatttagaaaaacaatcatgtgttaagctgttactgagcaggttaggaatggctgcctcagtacttgcatgccaccaaagcaaacaccccaaagataaatgatcctaagatagaaaatacagatcaatacacttggaatttagaaaaaagggcaatttaaaaatagatgtcaggataaacaggaaccaagtgatttatataaactagaatcatgtgtatatatttgcttttagtcccactgaagaagcaaacaattaactctataggaattggaggccgcagtcaggcagcaccaatagagaaaatgtgtcccatccctgtcacagctgtgttatgagtttattaatggacaccttggaaggagcacagctttcatcagtttaccaatgccaccctgctgttcacagaactgcacagaggcttactgaaattgctaggctgggagtaaagaaactcttgggcagctggttcagaatgcaaataaccctgtctttggtgttctagccttcccatttgtaagtgatgacagcattacattagtaaatataaatcaaacttttgcctgagttttctctactattaattttagttaatacataagttactgtggtacccatattcacatatgatgattctttgttcaccactcccatatcatattcctttgactcagttcttctttttcgagtcatccgttgctgctcaaatagttccctatttcctattattagtttcaaaattcatataataagtgacaaatatgaatgcagtttctcatgtttgtatttctagaagataaacagcctaatgagaataaactataattcagttttctttggtgcatattcacaaagtccttcattgcatagtgaagtcatgttgcagagagggaggactgatgagcaaaggggtcatgaccaggctgaagaaaccaacagaaacagctgacctgaacaaaggggagctcatggaccccagactgatagctgggataggactgattcagaccccatgaatgtggatgtcagtaagaaggccttggaaatttatagggccttaggtagtagaccaatatttatccctagcatacgaatggactttgggagcccatttcacatagagggatactctctcagcctagggaggccctgctccaaaggatatgacagactctgaagatcccccatggaagactccaccctccctggagagcagaaagagtatgggatagggagttagtggggggcaggagaggagggagggaaagggaactgggattgacatgtaaaacaaacttgtttctaatttaaataaataaaaaaggaaaggggaaaaacacatttcatctttgaattacacattccataaagatagtgcacattgacatggaaaacacctcatatcatatgatgtgatttttgcttcaggaaatactgtgtcacccataaccagggtgtcttaaattctggagaatggaaagtcttttgagctcttcttccttcttatatttcacacacaaaaaaagagttacagtaattaattgggtaagattcaaaaatgttttgctaagtttttcaaatatatgacttcatagttcagtttgtcttatacatctgagggcacctaatacaaaatctctcagctctaaaagttttaactgttccttccctacatgtaaaatagatgcagaggcttggaaattgggggacttctttttttgtttcctctctctctcctttcctctgtctgtcccttctttctttcttatccctaggaaaatagctgtgtagcttggtttgtaaccacttactctaaaacttataaatcatgcttatttatcatatgttacattatcttatgatgtaaagatatactgaagacaaattaagttttgttctttctaaatcccatggcttagtactataaaaataacattttagttcaacacactacatgctgttctgattttttattattctcaacttgtacaatattggagaacaatagcaaaagaaagatatgaggaatttgggcttttacttagtattagcagtaatactaatattatttgatctttagggaattaaatggttaaaggtagcaattttagactatgtttactgaggaaccaatgaaaagtgaacctggaggaagcctaattaactttaaatcagaaattcaccagaggcaaacattgtaaggaattagaagacagggactatttccatgtttcttaactattcttgtcaagtctaagagtgttagaaggttcagtgagtttatcaataaatgctggcaaataatttttttcaagagatggctattatccttgaggttcaaactttccctgctccttagcagtttaagaaaaaaaaaaacttggtggaagcaaaggaggtcacagatatgataggtcagatttcccaggattcctggagaaaagaaatttcactggtgttttcaagtaacagagcacagaggaaacaaaagtctatgtgaggtcagaaatgcaaacacccactaggaactgaacccacagtcttcttcatactagacaagcagttagttaaattccaaacacctttatttactttacattatactttatttcgtttaagacagggtctagctaggttacccatgccaccctggaacatatgtcataatagatgaaaatattaataaaaatatttacaattaaatggagtgtcttttgcattgaccaatcacatatcctttgtgtaatttagttctcttcatttggaagagttttcatgtgtattatctcatgtagtctttaaaacaactatcaaaaatttggtaaaatagtattaataaatccccaagagggtttgtaaaacaggagtaaaatgtagcatacatttttaaccaaaatttttacaacattgtaaaatctttataataacttcaattcgatagatatttgggctttatatttacaacttaggttgaagacttcctacatatgggctggggataaagctcaattagtaacgtttgcctagtaaccaggaagctctaggttcaatcttctgtaccaaaattaccctcacctacacactttattgcctgtgggggctacttaagacattgtgtcaaagataatgtctgtgttttctctagtgtaatgtttcaatgtcaaggataatcatgaattaaagttttaaaatagagtcaacaaatagtagcaacatgattcagcaatagaacatcacaatctggtcccatgtgatagatctcctgaaaaggcaggtgtgcaaattagagggtgtaaacttacctgtgagatctttgtgtagcacatatgtgaaacaatggaatctgggcttactcttgagttgtatttccaaaatacctcaatacagcaatgcaaaatgccctaaagccctgataaatcctaaaattcaaagaatgacagtacctcagcactttcgataagggctgctcaatctggattacgtcattgaatataatgtgcctgttttattcataaaagcagtcaaattatcaaaaattttaaaaaatcataataaaaataaatatgacagatattactcccaggtactacaattacaagaatatccaattatacccaactattgtattttgtaaggcatcttaagagtcattttactctatacttatgatttttatgtaaacaggtaaatttattaaaatatagtattcaaataatggacagtttaatatttttgaagtgatcaagtgaaaattcttctttttcatttctgggagacattttgctgtctgtaaagactgtccagatacctatatttacaattcacagatgacaataagaatacttataaggaatcaggaatttaagagctgctatttagaaagagagaacatgaattccaagaaaaaaatcaggagtagatgatttttttcattaacattctgtgaagtgctccatgtaaaataaacatgaggtggaatgaaaaaaaatatgcgattgggtggtatttttaaaaataaaggagaaggaagtcttaatatatttaacatacaaatattctaaataagtccaaatatagacaaatagtttcaatactatttttctttaaaaatgctgacaaagaaagtatgagattggtttaataaaattgaaaagtatttatttgtagagaattagagaaaggaacacagtctcattttaaacaagtggatattaccccagagataacagtcacagtgatgaaagagaaacacttcttctcattgtaatatgggaccataagctgcagtgttcttggcattctgcagggctcaagacttgctaatgagagtacactaagtcaagattatgctagatctagcatccttttggatggaaaaaacaacaatgtaaagaatgcatacatcagatgctaatgtaagcacaaatggaaaaacaggaagatgtggggcacggcagaaaaaaatgtccagttttgatattgtgccactgtgtaagcagttgaatttgtacagtaagccatgcaaaccaacaaacattgagatgagttgttggcaatagggtcagtgaagatcagagctagagataagacacaaaggaatgtcaggatggagaagtgcacaggatgtctgctgtcagcatagacagtgaaagtcatgataccctgagaaatgatatgagatacctaagggcttcaaatgaggacaagtaataactcctgagccacacagtaacatgatcagtgtatatgtgaatttatgaactgcagcaaaacaatgatgctaacaacttacaagtttctcacaataatttacttaaggcacagaaaacagatcaagaaaaatgatagcagttgatggcagtaaattgaacttaaatacaatgctgaagatacaccagtaggatcttctgattttatgttgaaggtgagcaaaggaaaggggttaagacagactcctctagctgatttgatcatgctgggtgcttaatgcagtccccctcccacatcaagtaagtgtcttcttgcaataaaggaaaagtaacacagaccatagctgaatggagcatccatatcatatctcctccctccaagactcagggatcattaaggaagaggaggcagaatgaaacatggtagacaactgctgtgaaagtgtgttttccagatattacagggatgttttcacacatgaactcatagactagactgtatgcagaagacccacacaagactaggctaaccaaaatcctgacacaggaattttggagactgggctcatgaaatcccacccctagctgaagatttattggcagttgatggtttctaggaaagggaggatcagttttctttagggatttcacctctaaatggttaccaagacttcagtagattgtcctataaccatgcaaatacagtcatcactaattggtctcagcaggtttgtctttttgtttgtttgtttgttctttttttagagtacatgatgttgagaggaaaaaaatggttggaagaagctggagggagaaaatggagatagattaaataaaaatcaattatatgtattatgaaattctcagtcattaaaaagtcattttataacaaacagatttcattaataaaagataggaactctccagtttgacctgaattagaatttccatgtattcaaagaaaagatagaactaggtttaggagtcatagcgaatgccagtttagcttgagacataaaaaatttgaaatttgaaataagtattaaaagttcaaatcccgctgttaaaagcaaatacttttgacaacaatccagttctactcagcagctttcaggtcagcacacaccacagaacagctgctcttcttttgggccatacaagaaagtttgtcttttcaggatttaccttaattctgccaagccatttactaaggaagctgtgccataatgaggcagaaatagtttgattggtaatgtaacaaattgaaaatacaaaaagtacaatttcaactatatcagttcaaatcccatgatcttacacattcaaacaatttatactatttgaccaaatagatatcaccaatggtaatacacagcaaattagactcatttatctccttgtactttatatttaaatgaagaacttcattcctcaaatatgttcagcttatattcagaaaggtgcatagtgtaccacactttaaggcacaggataaatttgggcctccctaatagctgtagaagggaagggacacatggaaaccaccaattactattggcaacagattctgagagatgaggaggcagcatattcacctgtatgccagcatgtgagtccactgggctcagtcaggaacaaattcggggtaacacagatgcccttgataacctctgtgggacagtaaacatgaccaaaactagcaaatagggtgaaaatttatacaaaggagtgggggcaggatgagtgtgaaggaaatacaagagggtaggagaaaaaaaatcagaacacatcatatacatgcattaaattgtgaaagaatgaaatttactactatgtgatattttgcatggtatgttcttagaaaatcattaagtgcatgtctgtgtgtcttacataggagtaataaggaaagtgctgtgtgctgtaccacttagcaagtaggtttacagtgacaggcacttctccacctctgtcctgctacagtattttaattcttttttttctatcattttttatttgaattagaaaaaagattgatttacataacaatcccagttcccttttccctcccttcctcccctaccaccccacaactaaaaccctatcacatagcctttcttccattcttgacctgactcagcctttctgctccctcatgacatttgcatccttcctcttcttcccttctcattctcatagctccctccctcctcttcccatgctctcaatttgctcaggggatcatgaccctttctccttctccaggggataaatgtttgtctcctttagggtcctccttgcttaatagtttctctggcagtgtggattgtagtctggtaatcctttatgtctaaaatccacatatgagtgaggacatatcatgtttgttttttgtgattgggttacctcactcagaatggttccttctagttctatccattttcctgcaaatttcaagattccattgaattgttttgtttattttccactgagtagtactcattgtgtaaatgtaccacattttctctatccattcttccatagaggggcatcaaggctgcttcaagtttctggctattacaaatagggctgctatgaacatcattgaacagatgtccttgttgtatgaatgtgcttcttttgggtatatgcctaggagtggaatttctggatcttgtgatagactgattcccattttcttgacgagtcaccatactgatttccaaagtggatgtataagttggcactcagagctatagtcctgaaaacagtttggtattggcacaaaaataggcaggtagaccaatggaatagagttgaaaactctaatattaacccacacacctatgaacacctgatttttgacaaacagtccaaatatatacactggaacaaagagaacatcttcaacaaatggtgctggcataactggatgtaaacatgtagaatactacagatagacccaagcctttcaccatgcacaaaacttaagtcaaaatggatcaaagacctcaacaaaaacccagccacactgaacctattagaagataaagtgggaaatacctttgaattaatgggtacaggagaccaattactgaacataacaccagtagcagagacactgagataaacaattgatgaatggaacctcctgaaactgagaagcttctgtaaggcaaaggacacagtcagcaagacaaatggcagcccacagattaggataagatattcaccaactccacatctgacagaaggctgatatccaaaatatacaaagaactcaagaagctagtctccaaaagaccaaacaattaaaaagtggggtatagaactatatagacagttctcaatagaggaatctaaaatggctgaaagacacataagaaattgttcaacatccttagccatcagggaaatgcaaatcaaaacaactttgagataccatcttactcctgttagaatagctaaaatcaaaaataccaattacagtttatgctggagaggatgtggagaaagtatcttaattcttaattgtactctttattctttcctttcagaaaaacctgctatgtgagtgtgcaatgatcatgaaataatgttctcccttgtcacttggggtaaattaaagcagaagattgtaaagtgtcctcacagaatccttgatttcaaaaatgtaaggccagcagccttctctcagtcctcctaagcagtgtctagcctcaggggcagagagacccttcacttccatggagaagtagatatctcagagccattaattaccatctgtctgatttggtttgacactatccgttaaagctttcactgactgtatcctgggacctccttacacacaagggtgactaggcagcaacgatgtattttacatttcaaaattcttaagcagagaattttggatgctagaagaaagatctgataagtgtttgaagggatgaatatgataatcagcatgctttgatcatcacaggatgtttacatgtctccaaataccacaccaaaactatccttgtgtccattaaaaatgaaattaaaatacaaatatttgatgatgatttatatcaatgagtagagataaaatggatatatattattcattaaagtcaattacagttctgattattctcaactcttgaaagcaacaattgtctgatacaatgccattagcaataatggaaaaacttttctagaaaaatgcaacaagtgcattttgtcaaggtattgctccctaaagatttctcaattaaaagtttgagcatttgggggacactatttttctgagaaaaaataacaacttaagtgaaatcatgcgaatttcttttttgcaaagattcaggaaggattataggatttagttatgttgtgtaaattattaatacatatgcttatagtaacttcccccacttgaaaaaccacaaggcaaaggtgtattctttttacagagtgtaaaaatagtactcttatccatattataaagagtaaatattaaagaaataccgcagatgtttttaaatcatcttgcataccaactatgttatattttcctctccccatatcctgctcccacacacacagagaagaatcagggagggaggaaaacagagagagatgggagatagagagacagagaaacagaaggacacacacacacacacacacacacacacacacacacacacagagtccctctctggtaaagaaacatactgaagttagagggacctctacatttctctcacaggcctgtctgtaccatcttcactaacataaccaaacttggaggagtgaaaagtttgaagatattctatgtgtgaccaaagttgttgagcaggaaagcaagagctttctccatccctctgtctagaaatcaatgattttatgcgacatttgattgtgtgacagtaacagacagaacttcttcaaagcctggtgtgtcaaatagagttatgcttgtctgaaaatcaaacagagctggcaggaaacattgaaagaaagtgagtttccagacagaatcgtgtatgaaatatttccttttgacatatggtttttgagcgaacatgtttttgaatctgaaaaataaattatgtgtagtctaatatctgcaagttgatcaaccaagcaacctgacattaaacaatgagaatcccactgtctaactaacatggagccttgtcacaaacagaaacaggaaggaggttatgaccctactaatttgcagcattgttttatttgctcaaaatggtttgtgatggttaatcagctataaaggaggacaagcactagcatccttcacatgcctcttgtcagtgctagattttacaataaaccaaaataccttctttccctcttgacatgatattggtcagtaagttacttggcaataaattctgaagaatatcagatatttataagtggaaaaatcctgatatgaaagagaaaacaatactacacattgctgagggtgaggaagggcatcaactccccagagctagatgttgcagctttcactgaacttaagtgcattgctgaagttaacaaaggacctgctataattccaacatgtagagcattgcttttacactgaagctctcccatctggagagaaccagaagaaccataagactcaggaatccaataaaatttacaaggcttaggaaggtcaggaagttttgagactcacacattacaggggcaaaaatcacttgggaaaggggtttctctatggagcagtcagcaagctagttgtacaactccaagggagcaactttgctgagtcttctcacatgcttgggtcagcttttcattgatacagctctctctgattcatccatgttcctgaaggtaactaacccctactcttttttgcattaatacaccaataccccattagttcattgaagaacttgtgtggagtcttgtttgttttatctattgcaacagtcttacaggtgtaaatagacatttatttgtttatgtgttccagcggagtgatagaacatcccccctccttttaagaatagttattctgaaggtaattcacgctgaatatcagatcccataaaagcaaaactaatagaaaatggatttcagggtggcaatccaagagatacaaatagagaacaggtagataaatgacatgaaatttcattggaaaacaattagtggatgacttataggatttattattaaagagttttaagctgattttatatatttatcccaatgcataatcaggaatataagtaacttgaggtttcaggagttgggagggaaatgccttagggataagtctttcaggtctgtcctacctaagaccaacttggagagttttttttaaggatgtaatatcaaagatttcagtgcatttctggcattctggggttgaagatataataatgaagtcaatcaagagatatttcttggaaactagcttcttgagttctttgtaaattttggaattaagccctctgtctgatacggggttggtgactatcttttcccagtctgtggactgctgttttgcttttttgaccatgtcctttgccttacagaagcttctcagtttcaggagatcccatttatttcttttttcattttttttatttgagttacaaacacaattgaattacatgacaatcccagttcccttctccctcccatcctcccctacgaccccccaactaaaaacctacctatcgcatatcctttgttggactcaacctttctgctccttcatgacctctgcatccttcctcttcttcccttctcattctcatagctccttctgcccacttcccatgctctcaaattgctcaggggatggtggctctttccccttctccaggggacaaagtttttctctcttagggtcctccttgttgactagtttctctggcagtgtgtattgtagcctggttatctcttactctatgtctaaaatccacatatgagtgaatacatatgatgtttgtctttttgtgattgggttaccttgctcagaatggtttcttcgagttccatccatttttctgcaaatttcaatattccattatttttttctgctgagtagtattccattgtgtaaatttaccacattttctccacccatttttcagttgaggggcatctaggctgcttccagtttctggctattacaaacagtactgctatgaacatcattgaacagatgtctttgttgtatgaatgtgcttcatttgggtatatgcctaggagtagaaatactggatcttgggttagactgattcccattttcttaaggagtcgccatactgatttgcaaagtggttgtacaagttggcactcccaccagcagtggagaagtgttccctttctccacatcctctccagcataaactgtaattggtgtttttgattttagccattctgacaggagtaagatggtatctcagagttgttttgatttgcatttccctgatggctaaggatgttgaannnnnnnnnnnnnnnnnnnnnnnnnnnnnnnnnnnnnnnnnnnnnnnnnnnnnntattgagaattgtctatttagttctgtaccccactttttaattggtatatggttcctagtctccagtggtgtcatattgagttttctgatgttgaatgcgtttttaccttgccctattctcgtcctttattctgctcagtgtagcaggagtttcttgctctcctggtgggtatgggatcaaggttgtttctggtagatgcaaacagatccagactctgatgtctgtcctcttctcttgggttgaggtgtcactattaccagggccttgccattgttcggttgtgttggatccctccgggctgggctgtggatggatgcagaactgccactgggtctcagtgtgttggagcctgctgccgaactcagatccggcacacagatcactggtgtcgagatcccatttattaattgttgatctcagtgtctgtgctataggttcaggaagctgtctcctataccaattcattcaagcgtatttcccactttctcttctaagatgttcagtgtggctggatttatgttcaggtcattgatccatttggacttaagttttgtgcatggcaacagacatgaatctatctgcagtcttctacatgccagcatccagttatgccagcaccatttgttgaagatgctttctttattccattgtatatcttttatttctttgtcaaaatcaggtgtttgcatgtatgtgagttagcatcagggttttctattcaattccattggtctatgtttccgttcttatgtcaatactaagctgttttcagaactatagctctatgataaagcttgaagtcagggatggtgatgcctccaattcagagaggctgtggataggtttatagaacatactactatacagcttcttttttctaaaagataggaagatactagaaaataatgactcaatgtgcaaaagatgcacaggccagtaggaccagtgtgcactcctcatcagttcttgtgtgctgaaataaataaacactcaataccagcacagtgggttgtttttaaatgtatctccacagatacttgaacactacaatgcttcgacagcttcagtgtctctaggcaacagggatgttccagtttccttataaacttataggactactgtcaagttatgtggcctgttgctgtttgtaacctcattaaaaagcctgtcactgtgatgatattcattaagcatatgactgctacaacatgaaatgaacacctatgaatatataggggaaagagagtcagaagaaaagaaaatgtagagaaaatactgtaagacccttcacaggaaaggggaacattagtaaatattttgattgcatgttctgtgtatgtgtatgtatgtgttcatgtgtgtgcatgtatatgggggtcgtgtgtgtgtgtgtgtgtgtgtgtgtgtgtgtgtgtgtgtgttctcagtcctcctaagcagtgtctgtcaatgttgtgagtcttcttcagtcattattcaccttattctttgaaacagtatctctcaccacacaggcagcttgtcagtttagctagactgtctggctagtattatcatagcttgcctttacataggtgctatatatctgaactcagatgctcatgattacagagcaaacaatttgctgtctgaatcatcttccaaacccaagtacttgaaagatattcaaccttgctaacaggcatggaaacactggttaaaacttaaatgatagcatttttacatagtctagactcaaaagtcaaccactgccaagaaaacaaagcaagagaatctgccaatgagaggatgttaaggtaactttggagtagttttggaaattaggacagccttctgacttagttaaacactgatgtttcagtttaagcaatctggaaatgtggctctatgttggcttcaagatatgcactgcaatccaatcaagatgtgcaactgaaaaactccattctgccagtgggctcacatataactgactatctcaactagctttatcctctttctttgttacctctgcttggtgttttcctgcaaatgccaggggagtaattaagaaaatctaacacttcataatattatgctaaattgtatatttagtctctatctttggagcctaacacacagcacctcaaaccattggatctatcacagagatcattgcatattaatataactgatcatcaaggcttcaaaacaacctgattatggaggataaatgcttggaagaagccatcatactagagtttagtggcattcactatggctgcccaacctccagggagagaagaggaactgaacattgatttggtcatgtgaagtgaaaaagtgaagagaggaatttatctgagaaaagttagggggagatcaaaatgcatagtatgaaattcttaaaaatataataatcccagtttggatctcaggtgttgtgtgttgatagaactagaattactttcttatttagtttaggtctgataatgaattttcacatattaattgtttttaattctatttgcttaaattttaaaatacattttatgataaaagtagaaaaataattaaatggtaaggaaacaaatagaaaaattcacacctagcctgtactaaaatttaccacattgcaatttttctataattatacttctcttatttaattgaaaatcaaccttttagcttaaaagaaagctagtactaaaacagagttcatatcagaataattatgtttttccccaaaagaaagcttgataaaatcaacttaattgtataattttaacttcccattattgaaacttaaattagtaatgataggtgtttaaataagcaatttccaattacaattaacataagcaattccttaccccagctgtaatcaatggagctattagagtgcagtaaacagtctttattgcagtgaattatgttctcacatcacaggctctctatcagatatactggtgtttgatgttttaaacttacatactacaaccatgtgttaatttcatgtacacaaatgtgccacttacaagcattcatctttgtgattttttttcatcttttctttgtaaatgaaactaaaaatgcattacagacagaaaaagattcaaactagaaacactagcaaaaataaacattattttttggctatagttcaatgattaaacatggcttgaagtgtaaatctcattgttattgctattactgtttccatttttaaagaggcacagtctcatcatgagacaatttacatagaaagaaacacgtttacatgaagcataagcagagtatttattcatgtcaaattatagatattctatcttttctacactggtagttccagaaaagatggtatatagatgggaggactcaaagaggagatgaaagttataaggctgtcctacctggcatcagaggtcaacttgacatagcctactgttatctgagggagttacaattgaggggtcaccaggatcggactggtttgaggtcaagtatctgagcaatggtcttgattgattgttgatgtgggaggacacagcccactctgagcaggaccatccttaggcaagaagcttaataaggagtctagctgagcaagtgtgagagaatgaccccagtagcaaacaaaatgcagcatccctccatggttcctgcctctaggtgtttgtcctaacttccttcaatgatgcattatgacacataaatgtcatctgaataaaagctctccttcctccttttttagaatactttatcagagcaacacaaaagatcaccagtgaagatgccagcagtgattagacaaagatgactctaaatcaacagagagaaccccatatcacataaggatttaaaggtattaaattcaaaccaacaaatgggaaagaacatatatgctatttgcaatgtacagatcagaaaacatcctataatttgattcaatacatttttttcacttgaaaccatgtgatgcagaaaatggcaatattttccagttctttggtatttcattggctactagaaataaagacaaactcatttcaatgctaagaacacattactgaaacatatgacataaatctagaatcatctttttgttctatttttgttgttttgatgattagaaaaggaggtaaattgcttattaattttacaattaattctttcccaatgattttaatttgtttgtgaatacaatgtgttatttatttctgtaaattacttttattgaatgataagcagaatcatattcttaaatgaagcttaaagcccaggaaaggtcaaactaaacttatatgaaattttccatcattataggcaacttgcttttccatccatttagttaaaaaaaaaaacagttctccaaatcccatggaatccccaaatccatttcaccacttcccacaatatgagacttagtctcagaagcagagaaagttcagagcctgtcccttatgtctataaagttacagactgtccactgaaacaagaaaaatagccaagcacaaggctcaagagactttagactggacagattattgatgggggatgtccttctgtatatatgtttctcttattggttgataaataaacactgattggccagtagagttaggaacatagccagggctaggagatgaggataattctggggagagaggcagagagaggccaccaggaaaagacatcaggtagagagactggaatattggatgcaccaggtgttttctggtaagataaggccacatagaaatacatagattagtagttatcagttaataatcaaaagagagatagccagcaagaaactctagccattggccaacagtttaaaaattaatatgtatctgtgtgcttacttggggctgagggtggtgggatctggtgggacagaaacctccatctgcagattatcaccaactaatgtatgctttttcaattccctacggtttccataaatctttacagagaaaacccaaagtctcactgtggggaaaatgtctaagatgccatccctcacactgttgaaagcaatgaagtagaaatatgtgtctggggtacatggttagcaacaggagattatggaaaaagcaggtcagtgttcatctttctaggcaatagaagtagcaaataatgaaaattacattaacatttcatttgcttttagttaaaaattcattatgagataataactaaataaaaccaagatggcactgtcccatattgaaatttgatctgctaagtgaagagtagtcccagccattgctatctggttctaactcataaggatgaagtatggctgagagactttgcttctcaaaccatcaatttgttagttattttcattgtttagagttttatatcatttgtaaaatttagtgaggatgggattatgttacttatttattcttgctttgctcaaaatcaaagagaggcctagataatgggcattcatttataaatttagataattagagttaagaatagtggatagagaattaaccagcttattaactgagcaaatacaggtggaaacagaaaagaaaaacaaaaagcatctctgtgaagccaaagcagtaggtctccattgcaaaggagaataggctttccttcaagaggcaattacattgcattcctctcccacccctcctcattgttgttcaccaggactgaaataatagattcatctgccctaaaggtagacattattagtttctcacttgtatcaaggaaagtttgcctcattaacagaagtctcccccatgctgtggttcatcatggttatgcacaaagcagaaaacttcattaaatcagctcttcaacattctcctcttacctcttcattcaggatttatgaaatgagcttacccaactccctcacctttgaagagtttacacagttgattagttcattatccatccattctatgtgcatattttcccatgaacatattccccaaatccacagcaaacaatcacagcctcaaattataccattgtgaatttgtctcgggcttgaaagctgtgtattgattgtcaccggtgttgtaaatgagggaaggacatcatctgtgcagcttttagtttctccagacagatttatgtcataacttcaatttatgtttggtgtcctgagttttatctaacttggtttgcttttctaggaatcactagctgatgcataaaataatgacctttgaaatgtgtttgctataacttagcaacagagcagcctggactttgaaatagatcttgaatggtaatcatctgtcattcttccaaagtgtgcatattcccttgcttggcataatttattaaatattactcattataatggaaagaaagaaacatagttctttacacatagtccacagactgttttttttgtgttgcaaagatagaaacaaacaaaaataaaaaaatcagaaaattatttcaagcatgaattcactgaaaaaatataaacaggttaataaaacttccactaaaagcataagtgatcatattttacaagtttttctattgcttgttaatctttcatatacaaaaacaatctggataacaacaattatataaatgtatgggttttcagagttcttaatacagtgatattatatataacaattcagcatgagactatccaggtctcagaattgtcaaacagttctactgctttgtacaatctattgtccactctagacttcagattaatctttataaaaatatcatgtttctctggcacagggtaaatgttaggggatccacagggatgatcccaactaagaatcctggcagtggtggtgaagatgcttttgatgcttttcccctataatgggattgatgtgtaccttggttaccattcctagcgccttcatccagtagctgttcgaagcagaaacatgcacccacagctaagaattgaaccataatcctggaatccatttgtggagaggaaggagggatgagcaaagggaccaagacggtgctgtacaaaattgcagaaacctgcagaaacagttgatctgatctagtgagggcatggagaccctagtcataaagctggggaaacagcattggactgaacaaagccctctgaatgtggcttccagcaaagaggccaagacagtctatgggatctctaacagtgaagccagtctttaaccctagagcacaaatcaattttgggagcccattcccatggagcaatactattacagcccagaaacagcaaggagggcctaggacctcccccaattgataggaaagactttgaaggtcccctgtggagggcctcactatacatggggaggttggtggggaacatgggtggatgggagggtgagtgaatgggggggatgaatatgtaaatatgaggagtaattaaagaatttaaataaaaatatcatatttctattgcactaaaataattatatattaagaattgtctatttagttctgtaccccactttttaactggattatttggtgttttggagactagcttcttgagttctttttaaattttggagatcagccctctgtcagatgtggggttggtgaataacttttcccaatccgtggactgtggttttgtcttgctgacgatgtcctttgccttacagaagctttttagtttcaggaagccccatttattattgtggatacagtgtctgggctactggtattatgttcagaaagctgactcctgtacaaattcattcaaggatatttcctactttctcttctaataagttcagtgtggctgggtttatgttgaggtctttgatccatttggacttaagttttatgcatggtgatatacatggctctatctgcagtcttctacatgccagcatccagttatgccagtaccatttgttgaagatgctttctttattccattgtatagctttggcttctttgtcaaaaatcaggtgttcnnnnnnnnnnnnnnnnnnnnnnnnnnnnnnattccattgttctacctgtctatttttgtgcagggatggtgatgcctccgaagttcttttattgtacagtgttgttttggctatcctgggtcttctgtttttccatataaggttgagaatttttttcaagttctgtgaagaattgtgctgggattttgatggggattgcgttgaatctgtacattgcttttggcaagattgccatttttactatgttgatcctacctatccaagaacatggaagatctttaatttctttctttaagactcaaaattcttatgatacaggtctttcacttttttggttagcattagcacaaaaattatagattttttttatttttccagctgtagagacagcagagcagtttggactggagttcagaccagggcacctccattaaaggcaagggatctacaaaggatggaactccatctcttggggtgtgatatctgctctggcatccatacatttctgcacctatatgtgcctacacagcaacaaacagacaacacacacacacagacacacacacacagtcacacaaatagatttaagactatgtatggaaagttatgatagttaatattgttatccagctttaaaagctcaagaaccattgaaaagcaaatctgtgatataattctatttcaaagaaaaccttaaaaagtgaattaaccatttcttatattaattttgtcagattttttttcagcaatgactcaaggaaacactagaaaggttaaatgaagttaggtgacatatgtgtgaagtaggcagtaccaaataaactctggcatctttcagtactgtaaatgagtacctctcccatgtccctatgagtcacctgctcatgattttctactatatattctctttttatttatcattgttggtctggtgtggggagagactaactcatatctactttgtgtttttgtacatcagggacaactttatgtagtcagctcttatatctagagacaggtttcaggcttacatggcaagtgcctttactcattgaaccttcttgcttgccatccccccaccacacctttctttttcttaaaaggcatgctgtcatcttgctaaattctcttttgcataacacacttgtggcctgacagattgccagtccattgaaaaccacattttttccattcactgagcatcagcttacattgtgtgatgagtctctcttagctttgtggtcctggataaaacacatgtgatactatttggaacaaagaaacacaaaggaaagcagaggaacactactcagttctcttcatgactcaatctgcagtcttaagccatttaccgactgtcccatgtcaccattgtcagggaagtgtgtacattcctaatgttgtctgcaagagtgactggaagatttccttcagattacatgggatgttctgtgctagtattaaacttggttctagttcatcaattagtattagtataaacagaccccaaagagaattttcaaaggttgctatgacaacatccagcctttctaggagcaaaagctatgatggcctgtttatatggcaaaaatacaaagatgttagactagaaataaaacagccatggcttgtcaatggaggtcctctattttcatctgcagcttcacagatgtgtctgatgttaaagacaaacatgcactttgtcttagtcatttatgagtattgacatacaaatgtctatgtactggatacaaccaaagagaaagaaacaactgtccttttctgaagcttctctttattctcccaattgttctgcatacacaaactccagagctcagatctgccagggctgtcactgtagatttctacaaagcatcattctaaaaaattagcatttaaatagactaaacaccagaacaaagactccctttaggtacctatcatggcctcggccttgcattctcttcagtctgcaaatctcagtaaaacttcacctttatctactgctttaattaaggaataatagaattttcctctcactttccacatgtcattatcagttcatttcatgttcaccttcagaccttatcacaaatccaacaatgaatatccttctaacacttgacatcattcttcttacttgacatagttgcccaactcccacccccatatatcatcctataaacaagcagaattcagaccaatcctggtaatagggaatgatgaagattccattttttttctggtctgaaatctgaagacttctcattctgttttgaaaggccaaagaccttacagtacactacatcccttatataacctggcttttgacccctccttcactttctgtccagctatgccatctcctatactttaaccagacatctgccgcaggctctttgccaccaggaagcctcatctctcacctagtgcttgctatccatctgtgtcttctagcccttctcatctattcatttttaggtgatgcctttgtaaaccagcctgctacatgaaaaccctctgagtgagactttcctttgagagcacacagtaccactgaacagaagatatacttacttatctcatttgatgcttacctagtactaaaattggtgtctgtaactcagtgtgtgtacagaaagtgtccacattttcatagaaacctctactgtaggatcattaacattccagaaacagcttttatatgggtatgcatgcatgtatcatctttatatgtaagtggggacatgtgcttgtggttgtggaagtctaaggtttcaaaggtattccttgatgactcaccacttattttttctgaggcagtatcacggggtgaacctggagtttgccaggatcacccagtctagctattagcttgcctggggtgttctccagctatgctttccaatcctaggattaaaggcaactgttcagcttttacagggcttctagggacatgaactccagtcttcatgcttgtaaggactccactgagcaatttgagtagtataaatggattaaagggttgccattcagattagtaatgtgggtagggatgcatactttgcttagaagaatggaaattctgtcattttgaataaaaatatatgtctgtctttttttgagacagggtttctctgtacagaaaagttggtagacaaggctttctttgaactcatagagatctgcctgcttctgcatccagagtactgagattaaaggtgtgtgccaccacgtcccggtgtattacaatttttaggaacagtgtcttagctttttctctaagtatttgaagcccatcaactcctagattttcttagatttacttaggaaatttggtgcctttatccttacataaaccaggagagtttctgtaagatactaaatgtcatgtcaataaggtgaaactaccattcatgaattctgtatttttcatgaagaactcactcctcctcagcataggggaaaaacctaaaagttcttaagttttccaaccatgactttacacccttttcttaaatattttacacctcaaacgaaaatgaatgacaactcctaattcaaagcattactttgtcaatttctagaatgagtttttattaaaaacattaattatttctctgcaaagacaatggagctgttttcttatataagaattcttatataagatataaaatcatgcaagtacaaaaaattcaaaattctgaatattaagctacatttccctgttttgtgagcttatactacaggatgtcagcatgaatttacttttaaaatatgtgcttggaaactgggatgtatctgatttggtacagtgtttgtctagtgtgtttaaatccctcagctcaattgccagatcctcagcatcacataaagcaggcatgctggctcagagctctaatgtaagctctggagaggtgaaggtaagaggatcagaagttcaaaggcatcctcaactataggatgagtttgaatttgaggtcatgacctgaaataaataaataaatggaaaatgtctctgccattataaaaaagaaaatgatgaatgttgttatggaaacttgatgtatcaaagaatactcccttttactgtgaaaatctatcctccatgtgatcattagctttactaaaaagttatggctcccttgatgacctaggtcaagctgattatctattaaatatctacatatattgcaaatctagtgcacagccaagtgttaaatgtgtatggtattgagtatccatttgtttcaatgaggaggttttcttcattgtctacattcatttaacaaatcaaagatttatttgagttgtttttatgtggagttatttattccagtattgtcagctaaggcatttatcttccctctgttcccactttcatagcaacaaagaaaattattcagcagtgagtgagcataaggtcataagaataatacatattatgtatagtgatattttggggtggagaaagtttggatatgttaatgttaataactgcaaagcactccatacagagcattagagggaggcattatcctaagttagtctgataaattatgactgctaaattctgctgcagaagactgagactagtgtactttacttcatctatgaaatttcaagttacaattgcaaaagcaatatcaaatccattctactcaagagtctgcatgagtcttgagttcagatatacacaggagatctcctatggtataatatttaaaaacaactcatcacaagatgtcttggagaaggccttagctaaaactaaaagggttcttaataatttggtgacttacaacaatggtatttgttgtgtcttcattactaaatgaatggctattttgtatgactcttttaaaatatccctaatgaaatttatgatgatatatctgcagattaatgtttactgggagtaacaaactgtatgactctcaagagtgttttgtaggattccaacacctgatctaatggttgtgagctcttgacaaccaactagcaggcatcacagcagactctacactcaccacagtaatcacctctaacttacactaaataattattgcatatctctctatatcggggttttcatgaactaaatgagaaatattgagtagagtaagtcattcaaataacatgaatttaatgttatgtttagctgcatgggtacatgaagattgatgataatgttggtatttagaatccagtgccaacacagttcaaaaataaatcatttacctcatcaagattatgtctatgaacctgcaaagctcagtgttttacaggaggaatagagaaccactgacagatttcctctatcactgagcaggaatcattcaataatcaaatcaataaatgtttatcgggggcagtagggaaccnnnnnnnnnnnnnnnnnnnnnnnnnnnnnnnnnnnnnnnnnnnnnnnnnnnnnnnnnnnnnnnnnnnnnnnnnnnnnnnnnnnnnnnnnnnnnnngattcaaaaatcaaatggacaaaggaaagatacagcaaggcaaggggagataaaaggttaaaaagaagaaaagaaaatataaacaaaacaggaagagagaagcagaagagaatacggaaaataataattggttgctacagagaacatgatggtgggtaaaatatatagctaccatcaaaagctggatttatttggaaaaatataagaaagaaaaagtcaataataagaaccagaaagccagttccataagcacaactaatgcgctaggatgggctcctgagcttacataaagtcttgagattcattttttaaaatgatattattattttattattattaatattattatatcccgattgaagttttccctccatcctctcttccagcccctcccctccacctcttctatcctccctaccccatctactcctcctctgtttctctttacaaatgacaggcctcccatggatatcaaccaaacgtggcatatcaagttgcagagagactgcacatgcagtaagcacctcccctcatattaaggctggacatggaagtccagaatgaggagtaggatccttgggacaaaagggtcaaatacagtccctattcccactgttaggaatcccacaagaagacaaagcaacacaagtgtaacatatgcagagtacttaggtcagtccttacatgctccgtcattgtctgttcagtctctgtgaacccctctgagcccaggttagttgattctgtgagttttcatgtggtgtccttggtccctttcgttcctacaatccataatcacccttttctgcaggattcccaaagatccatctaaagtttggccatggatctctgtatctgtttccatcagctgctcaatgaagcctctctggtgataattgggttaggcaccaagctatgtgtataacaaagtgtcattaagcatcagtacattgacatttgtgccatttgtgttgagttctatcctatgtaccctctgggtcctgacattccagtaagtgtcaggggtgggcaaggcatagatctcaggctgaaatagtaattggtgggccactcccacaatttttgtgccatctttgctgcagcaaaggaaagacaaattgtaggtagaaatttatgtggctgggttttgtcccaatccctcctcttgaggttttgcctgtgtacaagagatggccagttaaggttctatgtcacctatttccaggagtcttgtttggggtcactctcctagattcctaagagttaccattgcactagttttctactgcaccccaaagtggtccccttttccagtagtctttttaagtactctcctcacccccctcaattgacccttcctgatcacatccaaactgccttcaaagctattctatttccccttcccaaggagatagaagaatctccccttgagccctccttgttactcagcttctctgggtctttggattatagcatgatttttttttattttacagctaatatccacctacaagggagttcataccaggttgatttttctgtatctaagttaaatctctcatggtgacttttttctataccattcatttgcctacaaatttcatgatattgttttttataactgagtaatactccattgtgtaaatgtaccacattttctttatccatcatttggctgaagaacatctaggttatttccaggttctactatgagtaatgctgctatgaacataattgagcaagtattcttgtaatatgattgagcatcctctgggtatatgcctaagagtggtattgaggtagatggattctcaactttctgagaaactgctatattgactttcaaattgttggttcaaatttgtgcttaaaccacaatggaggagtgtcccccttgcaacacattctcaccagcaagagctgtcacttgtgatttgattttagtcattctgacagatgcaggatggaaactctgtgtcattttgatttgcatttccctgaatgttaaggatgttaaataattttctgagtgtttctcagctatttgagattcatttgctgagaattatttgtttagatttataccccattttaaaactgtactatttagtttatttacgtctagtttcttatgttctgtcatatgtggggttggtgaagatctttccccattctgtaggcatccattttgtcctattcacagtgtcctttgccttacagaagcatttctgtttcatgaggtcctatttgttaagtgttgctcttaatgtgtgtactattggtgttgtgttcagaaagttgtctccagtgccaatgggttaaagtctatttcccactttctcttctatcaggttaagtgtatctggttttatgttgaggattttgatccacttggacttgagttttgtgcagagtaatagatgtggatctatttgccaacatccaggtagaccagcaccatttgttgaagaagccttttcttttctgctacataattttgtcttctttgtcaaaaaatcaggtgttcattggtatgtagatttatgtcttgatttgtgattcacttaaaccacagaagtctttagatattttaaaggagtggaccacaagttcaaacttgtaaacatcaagaatttctatgatagaaatattgggaaaatcttataggattatgggatccaaagcttaaagaaacttgagagatgattacaaatcccaaatgtttgctgaagggcaagttattaagggctaatatattttaatgtgctctatgatttgacatgcattaaagaatgcacttgttaaagacaacaatcatatgaaagtacatataaagactgtcatcaacatgcccatgtaagaaaactgagcagtgattgcatataacttgccatttggctatgtaaaaggaagatccattaaagtgacacattctcataggcattctttgcaggaacgttagtgtcttatgaagactgtctcctggcctccaggcttaaagtactcccttcacaagaaatacaaatcacaatagaaggtaatttttagggatatgaatccaggctttggaatctatttgaaatatgctttacatagatatgtaggttcataacaaaattaaacacatcaaaggctagctcacacccattcttacaaatctgggtctctttcccctaaatctcactaaaaatgatgagtttgttcctggcttattggtgaagagctgaaatcttagacacttggaggcttagccagaggggttgcagtttcaaggccaatctgagttatgtagcagagcaagactagcccagataactctacacattccctgcctagcatatataaggccttgaatgaataccatattaccacactccaaaatgagtttgatcatatgatctcagcattgcttttctatcatgctcttgcctttctcttaacctactttttttgctatttgcagtgaaggtataagggatcatatccagagtatacactgtaaacataccctgactgagctccacctccagcccttatcttttcttttgatccatctatttaaaactttgtaattccctcattttcacacatgacaggctcacagggaatgacttagcaggtaaagtgcctactgagcaacatgaggacctaatttcagatcccggccatgcatgtaaaaactcaacatgaaggactgcttctgttacgccattcctgggataactaaaacaaacatatcacaggttcctgcttaccaaactagccaaatgtgcaaattctaagccattcaaacacctgtctaaaattattttttggagagcaacaagtgaacatacccaaaggttacctctgaagtccagaggagtacagacaggtgtatatgccacacaggagaacacatgcacaaaacaaaaaataaaaatatcatatttttctttgttcttattgaaacaaagaaccatgacacaataatctcagttgtctggccactctttcacaagaatgtttcccagaagataaataactagatttcactatctagctatttaaggggacttaagaagaagtggtacatgacttttatctcagctttcagaacacaagatctatatagaaaattctacaccagccagggatacacaggcaaagcctgtcttcaaagaatgtaaaacaatcaaactaaaacaaaaagaatccatcaattttgtattctttaagtagtctgagtgtcaaacaatctcttttaataaccaaaaatcaatttagaatggcatgaataacacctctctgctcacttggtaattatgacatgttgctgtgttgtccatcattttctgtgaggctcccacctctaaactagactctcctttttcggtatacagtactctttcagtttcatgtaatagaataaaaacaagaaagattttgagcaatgaccatccctactatttcctcatgaaacagcccccacatgtgtgaatggatggattgatggactaaaaagcagggtttgctgtaaacactattaacaagttctgagaggaaatcacatttctttactcaaagcctagaaacaattttgccactgattataataaaatactttccaagtttgtattcacctaatgttttattttacaggacattgtctgtcatttgtataggactttcatgggggacttcaagggcaccacctctctcagcactggtcactcacaccaattttcacctaattactctcctcatcccatccaatttaatgcctttcatagaaccactccctctctttccagactttcagcctcctccttgcctagtgtgatcaatagctctcctttacaaaggcctcaggaactggacttgctaaagtctaatagactcatcagatatagctctcaaatgttaaatgccacactgacattcaaaaattcatcttgggtctcacatcagaaaatgaagccactgctttcatagttcagcaaagcaaagttctccatagagacagggtgtgaaagctgcctgcttccaggtggcaatttcaaatctggaaagcagagggagatacacagttcagtgatgtcatgctaaatcccattgctttgaaataattcagaaaagggaccacttcaaccatgtctgcagcaaagaattacacttatgaatgcatgcagtgcccaaatcactctgtgttggcatatgtttataaggaattaaagggtcacaacactagaggaatgttgaaatcataagtggtagcagcacacactgagcctgtacagctccaagccagtcagagtcccagcaatgagagggggaagtgaatatggtctcccactcctcactgagaagctatctgcaactgaaacctgcttgcaaaggaaaactcaatttccttcaatggagtcacatttgacatattaacagctttaagtgtagggccctggcccagcagcagtagatggtcaacacaaaaagaactaagttttgtagactttttgtctggcattgtttgtttggacatttttctttcttattggtcttttccttgtatattatagtttctaagtttgtgcttttatgggctttgtttgtgtgagtgaatgtgtatgtgttgtgtgtgcatgcatgtgtgtgtatatagtttcttttgtgtgtttgtgttagtgtgtagtttcttgtatgtgtgtatctgtctagtttcttgtgtgtttgcatgtgtgtgtgtgtgtgtgtgtgtgtgtgtgtgttcttctggttggtttgtttgcttgtttgatggtcggcatgctttgtaaaaagagtcagagaaagaaaagcctggagtatagtgacaaaatggggaggatctggggaagagttggggaaagagcatctgctaccatgatgtattgtatcaaaaaggatttaaaacatttttaaaatggaaaaacacacacacacacaaaaagaaccacagggacagcagccccttcaaagtgtgggatagtgagatagcacactttggtgagatttaaagatgctttgacatatgctcttttctgtcatttaataaatttatccctagtacaccaatgaactttgggagtccactccacatagagggataccctcttagcctagacacactgagagggtttaggccctgttctaaatgatatcacagactttgaacatccccatggaaggcctcaccctccctacagagcagataaggaatagactagggggttggttgggggcaggggagaaggggaggaagagggaactgggattgacatgtataacaagcttgtttctaatttaagtaaacacaatttaattagaaatatataaataaatgaaatcaatgcaactgctaagcatttgttttcatggcaataactcccaagagaatgaaaacttttaaagacagagaagtcatattcctcttgtactaaagatgcctagtgctgaagtttattttactcactcagcaagcatttgctcaaacaaggaattaagctaaaacacagagtgtctgtatttatcagggctctccataggcatacaacagggttctctcagagatttactggcatttcttacatcatcttctgagtagtccaaaatggttgtctcctgatggaaaggccaggtagtagtagttgttcagtccatgagattggatgtctcaatatccccaatttcataatggagtctccaagaatgtctagagacctgtcagtatttagtctatattgaaatcctgaagaaataggttctaatactagcaaatgaatgcctcaacaacagtatatatgaactttctggtgagagtaaggaaagcaggcaaagaacaaatattccttcattcacgtcattttatgggctgtcagtaagccatgtggatcagctttctagtctatcagtagttctcaacctctgggtctcatctgctttggcaaataactatctccaaaaacatttacattatgattcataacagtagcaaaatcacagttatgaagtagcaacaagagtaattttatggttggggaatcaccacaatattaggaactatattgaagggtttccgaattaggaaggttgagaaccacaattacatttttctgacctcactcaaatgactcagtaaagaaaattcaacacagaaatacccagttgctgtgacaggcctgaacatatggatttttgtttgctcatttttataaatgtgggatactacagtgtggattggaacagtggatgaacaggttttaacaagtcatcctaacaggagcttggaagacaatagtgctgaaaaccatgagcattatggaggccctgctctaaaagtttcagagggagcagagatagactattcttgtgggtgcttttatccttttaataaaacatacaagcccattggattttaggatactgagactgaaccagaaagttccaggcacattccttgatgtcttcttcttctacagttcagctcctcttcatccctgagaatggaattgcaatgtaacccattgaagaggaagcctggtttgcatgacagacttcgcagtgtcatacaaagaggctgcatagccatgccgaatgttcattgttgaaaatgagattttaatttttccttgggccaaagcatattaaaaagcttcttaaagagtttgatgagtgaaaataacgctgtctatgtaagcatgtcctcctgaggggataactgagtaggacattctaacaggaaagcttggggtggttagtccttgctcatgcctctcttttctttattccctccctgttgctctatcttttaggactcctggtctccatggtgacaccatataaaaatctattatcaaaactctcaaactaaagccatgtttcccccacaggagattacatttcccagaaatcaaaatctcaagctacaggaagcaactgcctaggcaggacgtcaagcatgtcaaatgtaccaattagcctcttaaaggagctttgtgaaagaaaccttctccttgacttagcagaggaagaaagtgaagatagaaagaagagggagactttgagtttcttcaaggctaactcttttgattgcagtacccagggcataggctgacctgagctattaaaactaatagtgtagaaatggacactaggaaccagatgctgccagataactttttttcttttacacaatgtttcttttgttctatatacagagacttggtgtgtctgctctgataattctttaactgcatcctgaatcagtgcttggtatatgcccgaggtagatggacactaatctagcaattgcttcaaagatgctttttgagtcttatttttgtattttttcagaatttcaatacatatgcaatatactctgtacatattctcctactttatgctctcatctcctttttgctttgctagagctccctttctccaacaagatctcttattttcatgcttttacttatttgtttgtgccctcggcatcaagggcatattaccagggatatacccctcagcaaggattaaatatcattagtgtcacagggagatacaatgcatttggttcactattcactgcatgatgaaatggtgatgggctcaaactaaaaattacaagaaatcagcaaatctcttaaagaaagcaaggaaagccaagaaaaaacaatcaaacagattaaggaaacaattaaaacagttcaagacatgaaaacttaaataggcaataaagaaaataaaaactgagggagtgctagaaatagaaaagctgggtaaatgatcaagaactacagatgcaagcataaccaacagaatacaagagatggaagagagactctcaggcgttgaagatacactacaggaaatagattcatcaaccaaagaaaatcttaaatctaacaaatctctaacacacaatatccaggaaatatgggacacctttgaaagattcaggcattatgctgtcctgcccctgttacctggcagaatccactcagcagtaccctggtcagcccagggttcaatgggaactgagtctgcacacatgtgtagaggatccctttaaaagacagacccctgcccacttacatggtcgacctctctctcctctctcttactctctgcctttctctgttcttccatttctctcccactcactttcctgccctataataaactaagaataatgtatttcttgttctcatgtctcatgttgcacctattttttctaatttaagcaaaagaataacaatggtgaaaagaccaaacctaagaataataggtatagaaaaaggtgaagaaactcagtgtttttatagacttcgtacaggtggccactgctactgtttgagttcaagtacaaaagccatgtgatgtccatttcttaagtttctaccaacatattttatcctagtgtaaatgagtcaagaggggaaatagcaactattcatcttaaagagcctgagttcctagttttcaggatgtgaaaactggcatttacatgttagcctgagtatatgttgatacacacaaaggtgctgttttgaggagaggttaatcaattagggaaagctaattaattccttattgagtaactggtttgtgttatttttgagttgttaatacaaagaaggcagctggcattgggtctatcctcttttcttctggtgtttccatgcttgtccatggtggtgcagtggcccattcactgtctttcaggatgtctcaactctgaggttgatcaaacggtggagtccacactattgcaaggaaatctgttgccaaagctagctgtatttctctagacaaggatgggagtcagctcagaattctttggattgaggatgcttccatctccattttagtcactgttcctcagttgtgaagagacaccataaacaaggcagcttaaaagggaaagcatttacttgggggcttgctttcagtttcaccttcatcatggtatgaagcattgcaggttctggaagagtagctgagagttcacatctgatccaaagagggcagggagaaagactgggtagaatatgtacttttgaaacctcctcaggtaccacattaggtaagaaaagaaacaattgcttcaatcatttgtttgaagtaggatttgcaagtggacaccatggcattaacaccccacccacatacacacaccacaaagacaactgcttaaatgaacaaaataaataaaatatgtaagtatagtcttttcaaattaaaatcaagatctttctaatttgactgaaggtttgctcaataggagggaattcatgcctagcattgtaaacctggctaactactcatacttggagaagctgtggatccaagaaagaactcactcactgttgctacatattttctaaagttattcttaatgcttatccttaaacctacaggtaagtgttggccttgcattatcaaagaagtttctttatttgcaggagacagagggtagtactacagagagcaacagctggttgagatgctgagaataagttttcatggtgtacccagccccaattaagcacctataatgcaacccctacatctaaaactcagggaaaactgtggaagatggcatgggaagactgtagaggacagaaggccagcatacttaataagaggtaatgtcttctagacacgaccagaataccagaaacaccaatgaaatctcagcaatagtctcctaaacaagacttgtgtaatgaaaatacctgtcaacttgccaacatgattggggaaaaccttactattcccaatctcttgatgaagagctacacagttagttaaagactaccaagacagggagaatcagacttccccaaggatgagtgctatgacaagttatgtattctcagtggtcattcctaaagccatctttatgagtaacactgaatcagtagattcctatgcaaaaggaagctaaaacaggagagggaatgggaatgagggagagaagacctagagggggaagagtggtagaaatacaataacataaatatagcatcgatacatgggattttcagaaatacataaatccatagaatcatatgagaaaatggaagaggtaaaataatttctaagtcttctgctcatatttgtgattagttcaaaattgggaagtttcctaaggctgtgaaatttcctttaatagtgaaagtctaaacatgaattgaaagatgtagacttctgtagattttcccaaagaaaagatccagaataaatttgccactgactagctagatcagctcttgatattcatgtgaaagccacagtatttttcacctttcaatgagccatgattgaaatctgtgtgtgtgtgtgtgtgtgtgtgtgtgtgtgtgtgtgtgtgtgcttgtgtgtgtgtgtgtacacacgtgcctctctcctctctttaattctctgtgtgtatacatattgtatgtgtgtgtttgtgtgttgtgtgtgcacatacatgaatgcatgctcatgtatgcactgtgcacagaagaggcctgatagatgctgctgacatgaaaataagaccgagaggtagcacaggatgagtccaataaagcagcccagtggagtcctaacacccagatacatccccaacaggaatttaaagcatcgatcaacataaacacacaccaggaagcatggaataacaggataatgtgtaaggaaaagacagaatgaatattacacatgatgccacagacatgtgtgaaacaggctttcttttaggccaccgacgagctatgaaatcacgatacagagacttattagttatgaatttttggctttatcatgtctcttattttaatctgtttttctttatgttttgccctgttttcattttgttttgtgtttaacctttatctctgtatgtcctacttccctgttttttgtgtctgtcaggctggtgacttcctggcttctgacgtcaggtgtctctctgtctccctcattttctcttccttcttctttctcaaggctaaatttcttctcctacttattttctatgcctgccagccctgcctgcccctctaatgcctagctcctggccattcagaactttattagaccaatcaggtaccttaggcaggcaaggtgaaataaatgtaacacatcttcacatcattgaagaaatgaaaatcttatttattgtgacaatatacatgtttattaaagatgtaattcatattaccaatctttaatctcttactattagtagacagagccaataactacttagacatacttgactggagatatttaaaacaatatatatgattctaaggaaaatgttataacataaaatttattttttacataaagtacttttgccattgctattagaattctgcatgtgtttggtccaccatcccaactgagttttgtaattcaaagtttgactccactctacacagattacagctcaacattccatgtcagtctttataaaaaaggaacttctgtagataggcaatgtcagcagtttaaaacccaaaataattctaaaccctggtggaatcctataatcagtgtattgatgaggaaaaccaaaatcacaatgtcacaaatagcagcagtgagcactttcccaacacaaatgtctctgagttcaatactcagtattacaaaattcagtacctatgaccaaagaattgtgttattctacataatgtcacattagcttccaacttttaaaagattctaagtctaagtgttttgtagaacccctcagtttgttcaaaatggtttggtttatacttgtgactgagaaatacttgcttatgaccaaaacactggggaaatgttcacaactagttgcagttatcgaagttaataaacacgagagtccttcaaatctgctttcaccctcttttcttattatatttttctttaaataaaatcatgcttctctatcacttctcatgtctacattttgcttcacattctttcatatttgtttatatttctaaagccaactcaatctctctacaggtcaaatacaaacacatcttatattgacatcttcccctgatacacccactttctgagactatgttttatttatccacactgtacagctctgtaattttccaccagagcatcttttcaggaaaccacaccaattgtgtccaatgttagcaattcttttgagtgagcctgaggtggcaaggagaagtatacagcttcgtgggtaacaggctacaaaaattaagaggtttagaggaacctgtcactgacgtggatacagaaacaggaagagaaggataattttttcaagacagggtttctctgtggctttggagtctatcctgaacctagctgttgtagacaatgcttgtctctaactcacaatgatccaactgcctgtgcctcccgagtgctgggattaaagaagtgtgccaccactgctcagacagaaggataatatcttaatacatagtcaaaaacttaaaactggccatgcccagagtaagaaaggcagccaggtacaatagaaaatgcccaacagtctaaaagagaagggagttttcacagcttctccattgacttcacactgtgtcttcacattatcttgcctctagggctgtgtcctaaaatcctatcaagaattatgtgttgtagatgctataattaatgttacatattctctctctctctctctctctctctctctctctctctctctctctctctctctctcttttgtttcagtaaatacctgaatctggctttcacccttcaatcttcctacttcaactttcagagtgctggaaattacaggcacatgttaccattctcagcaatgttatgctttaaagttgaggaaatttaagataaggtgagccaaaacccttgtcccatacttcacagtttataagtttcatggttaggtgaaatctaagctatctaccatatgatgctctgttagatttcaagattgatgctcttgagcaaacaaagcataccatatccacgaatgactccaggaagggacctaactagaaataggtaaagaatgaaggaacgatagagagacacatggactgacagacagaaaatctgtgatcagctgttctgagcttattcctggggaaaattccagcaccccagaagctcagtacatttattttacagagttgaatatagagacagggttagtgctgatgtaggatgtattttctgtatgctcttagtatatgttgctctcattggttgataaataaagctgctttgacctatggcaagacaggatagagctagatgggaaatctaagtagagatacaggagaagaagggtggggtatggaaggttcccgtagctgcccaaggagccacataccaaagcaccaccagtaagccacgggtcacatgataatacacagattaataaaaatgggttaatttaaatgtgaaagctagttggtaataagcttgagccattgaccaaacaattataattaatatcaagcctctgggtgattattttataagcagctttagggacagaaggaaagagaaaccagtccagagggactgagaaagacagagaaaagcctccagctacaattgtctcaccaatgtggggatctcatatttccatagggtctcagaaagctaaaataggtggggttctagatacataaacggagccaaaatgccttcttaattgtatccttcatccaggcttgagcacagcaaagtggattcccacaacagattccaagccacaccatgctatttggtggattcaggttttactcatacagacaagaaatgtttagaggccagctgaatgctacctaatgacagcactgtggagggtaagtgtaactctccttgctaaatctaccatgctgaaaagccaagcaggagagaaccaacaggcaaagcagatgctttggtcctaaccaagccacttaacaatttaaaagatgttatgtactcactcaaaagtggatattagacataaagcaaaggataactatcctacaatccacaaccccagagaatctaggaaaggaggtccctaagagagacatacatggacaccctcctgaggaggggaaaggggcagggtctcctgagcaaattgggagcatgggagagggggaagggagacaggagaaagaggaagggagaaggggaagggaaggagaacatgagggattagtaaggtcaagttgggggaagaacagagaaggagagcaaggagggagccattataggtttaactagaaatctggcaccagggatccataaggatgaccccaaatcaagaatgtaagcaatagtggagaggctaccgctaaaatgagattgatgactaccttaaatgccagcatagagccttcatccagtagctctccgctaaaatgagattgatgactaccttaaatgccagcatagagccttcatccagtagctctccgctaaaatgagattgatgactaccttaaatgccagcatagagccttcatccagtagctgacagaagcagaagcagagattcacagctaagcactgaaccgaactcctacttgagttgagtgatggctctgctcaggcccaaattctgccatccactctttggaacttcctgggcctgatactcatatattggacacacccagcaggatgaaccacctagagtctggccacacctcagtcttgccccctctgcaccctcctccctctgtttgatgtgagtgcgggctctgctaggggccaaactcccgccatccccccaaggacatatttttcttatactgtatataactttctacttttgtttaagatatttttgcatattaatagaaatttaaggttattgtcttatactgcatatttgtttctatttttgtttaaggtattacctatacagcccatacctatacaacttatttaattatgcaatatgtgttttagtcctcaaaagctgtttaggataacaaagaattacaggctaatagttaatcatatctgtaaggattcaggcattatgctgttctgcccctgtcacttggcagaatgccctcaaacagcccgctggtcagtccagggttctagggcaatgtagtctacactatggtacaaagaacgcctttaaaagaaacatccctgtgcacttatactgtcttgcactctctttttcctgctgttaccctgggataggcaggacttttcctgtttccctcttctcttctgttctttctttgcctctatgtctctttgactcttttctccttcatcccaactttccttttctaattaaacttctcacttaagctctgcctggcatgtttgtccctcacctcaggcaactttgtttgccatggaatccactaagtttcccctccagctttatcataacaatatctaacaaacttaaagtcatgtaagttcgattttcaaggtaatacagagatatatttcagatagataggtaatcttaaaacacttcaaagacctacacaacgtggtatttaaaatgtttttaaaccttacatttttcttgacaatgagataagtctgctgctggcagcaccaataattcaaagaggatgatgggtattgaagaaactccttatggagtttactttcaatgtggcaaggctagccatttggtcatgaatctactctttcctggactgcttgatagtatgctgtataaactggacatgcagaacccacagaaaaatgaccactgaactttgccaaaacaaggtgggatgttccatcaggcccctgattcacagaagaaactgttggacattatagaggaaacagaggaaagtgactaattttgccaataaataataaataagtaggtcagtccttcaaatttcttgtttcactgaaaagtctgtcagaaactctaggtctataggctgaagatggatgccctgacattgcaaaggaactttggtgaactgtctaagcagccccatgtctctgtcatttccagagccttggaagttgcttgtaatgcacttccttcttacttagataacattatatccttctggggttttgatagatttgaagaatagttataatcatagttttccttaggcatgataaaagataaattaaatacagaacttgagactcacaaagataagataaatgatagactattttcttgactttttggttataagaaaggagtaaatgatatgggatgtctttcagtacattgtgaatatgtgttcctcttattggttcataaataaagctgttttggcctatgtcaaggcagaatagttccaggcagtaaatctaaacagagatacaggagaagaagggcagagtctgtgtgatgccagcagccacccaaggaatatgccagagcacccacaagccatgtggcaatactttgattaatagaaatgggttaatgtaaatgtaagagctaattgataataagaatgagtatttggccagttataattaatattaaaattttgagtgattgttttataagcagctttgggaactagtggtggaagagaaaacagtataggaggacagagaaaatcctttggctacataggacacttggctgaaaaaggaagcggagttattacatacagagaaatatgcagataagcttattgtagacagttggctcaagggtacagatttaggtagttttgctaggatcagcccccctagaagaaaagtcttcaaagtagaaacataggtaggggcagttacattggacattatctgtaccattgtcaatattaccattcagttccccatgcaaggttttggcattttcctgtgaacgtcaccctcctgagggtagggatggtggctttgtcattcctccatggtctgaaggtctctgtatttgaaatggctgtgtctatgtaaacagtacacattcactcagaacttcactcattcaggccttcctccctacagagagaatacacaacatcctcttctaaggaacatgtatataataaagccttactgcatgtttacttatgaaatgaaacccttgttcaaaaatgagctggttaaaaaacagaagctctcaaaagagcccatgccaaaatcacagtttgtgtctgtattctttacacagcattttacatggcagataaaatatggaccttgacactgggagattgacctgagttacccttctaactcaagacaaccataggagtccttatacttgggaagaaggaaacaaaagcagctcatcagggagatgcaatatgagtagttagttggtggctgataaaagaggtgtgccaagttatactttcagcctttagcagaatagcatggtagaacactgggttctcctctggaatctctacaaagggactgctgccaacatcttgacattaattagactagtgaggcccaaatctttcagtctagagacttagaacataatgaagttattgcttaaatcaccaagtatgggataattggttacagaagacataagaattagtacagaggtaaagctttaattagaaattttaaaaagaagggaggttaactctctactaatatattcagctggactaatgcttctaaggcagggaaaaaaacaaagggggtggcaatattcttgtatatgaaaacattaggagaattgtggatagtccaagtataccctgtgagatatttcaacagcccaggaatttccagtgtttatagtgtcatcctgaagaactaaggaagttatcccaaggaaattaacaatagtacaatgatacagaacacaatttctactgaagctcagtataggtgaccaattatattactaatatattagtcagggttctccaaaacaacatcactaatagaatactgaatgcatataaggaaattaattagattggtttataagtatgctatcctgctagaccaggaagggttgcttcacactggagacatgagaatctggtagttgttcagtcctttgggctggatatctcagaaatcataattggacactaaagtcctgggtgattcttaggggtatgctgcttctagtatttgagaaggaatgtgatagccacaagataaatgaacttgccagagagagtgaggataaacacagtaagaggcaaaccttccttctataatgttcttatacctgcatgcccaccacaaggtgctacttacatttaggatggaacttcctgtttcaactatgttgatgaagaaaattcctcatataattgcacagcagcttttgttttacttaattccagatacatgcaagtttacagtcaatactatcaccacatcacataatgaagaatgagctgtattttaacttgtccctagaggggaatactatcaaccatttttttttaaaggagggtattcatattgatcagttagtttagtagtcattttatttttttcctccgttttttatttaaattagaaacaagattgttttacatgtcaatcccagttctctctccctctccttctcccctgccccccactaacaccctacctgtcccatacaatttctgctccccagggagtgtgaggtcttccatgggggtgtcttcagagtctgtcatatcctttgggatagggcctaggccctgctttatgtgtctaggctgagggagtatccctctatgtgaaatgggctcccaaagtccattcctatgctaggaataagttctgatctactacaagaggccccatagatttccaaggcctcctaactaacacacacattcatggggtctggatcagttccatactggtttcccagctataagtctgggggccaagagcttgggtttcaccagccagagggagtcttttttttaaaaaaaatatttattaatatttatttaactattatgtatacagtattctgtctgcatgtatccctgcaggccagaagagggccccagatctcattatggatgggggggtgctggaaattaaactcaagacctctggaagagcagccagtgctcttaacctctgagccaactctccagcacccccccagtagtcactttaaaagagagatatttaagacattaagaagatattcaattttctgatactttctttggttattgttggttggtgtttgtttcagtattataacactagtgtgggtcatagtccattagaagaagtgctagactacatttaattaacaagtctttctatacctctctggttttgtagcatttgagatctctttctctctctctctctctctctctctctctctctctctctctctgtgtgtgtgtgtgtgtgtgtgtgtgtgtgtgtgtgtcagtgtgtttatttgtatatccatcttcaatctatcaggtagttagagatcatctatctacctatcatctatatgtctattatcaagtattatctttctgtgtatccatttatatgtaaattatacaaacaaatagacacacacagacattacaaataacatatccacatacatagtcatacagagaaaaagtagaatccacatggtagaaataaggtctttattacacccagtagactaaagatgccagtgtgttgaaaatgtcacccacaaaattcaatgcacactcctgaaaattatgtcacgtgttcttattttgtttttctgtagctaagacttctatgcccttctatcatggatgttatcatctttctaatactttcacacatgtcatagcagccctcagtgttcggttcctgtttctcaccctcctattatatcagccttcatttcttgttctttccctgcagtttttctaccctctggtcacatactagattcctcacaagtggaaagagtttcttcatgtataaaagctttcttacccgaacccccttctctgagagtctctttgagttctcaatctcaaattcttagaaccctttcaaatatcaaatcatttctgaactatcccttatatcatcctctaaagcctacatcaatactcttcctctttgactcccacaatcctcatatgctaccaagagacatggacctctccacttttacctacaatttttgacttgctagttttaactgtgtctgccacccaccccaaaaagtagcaggaattcattttcagtacttttctctgcacatatttgcctcaaacagtatatcttacatatatacacacaaaaatacaatttttaagatgggccaaatttaattcatttcctacaatttttgtgcattttatttttcttacctactttctctggccagagtttaggaacaatgctgagaagtagtgaaaagggtgggtatctttgagtggttcctaattccaaaggaaaccatccagcctttcaccttttaggataaacttaatccccagcttgtcctgcattgtttctgttgtactaaggacttttttctattctgaatttctgaagacttttaagataaatgggtgttgaatttttttgtacctactgaaataattatggggcttttatgctttacttactatgtacatctttaagatatgttcttatataattatgttgggaaagtattctagaactctaagagtataattttagaattatgacttgtgagtgatgagactccagaacctattcatattacattatacaaacctgaaatttttcaaatatgaatttgctgaaaactttactttattgcagagacagggggtgtccacatcagctggactggttcacatcctcagcaagtccagggctcaaagtctacttagaacagcctgtagtcagcaactgatactcagatgtctgccagaagcagaaacctgtttaagacatgtttaaactaggaacagaagttaaaaattatttattgaagcccacagtgcagaaaaagcagatatctggatatctgttctaacagcaggaacatatttataattttgagtcctagcaaaaatacagatttgggctataagcatgtacatttttcttctgtccagagagccaggtatggattggacagaggtgcctttggcttgatgaaaagccctttaagtttgtacttagatgacaaccaaaataaacttaaaaccttgaacttgtgactgaacagtacgtagccattactttatcagcaacatgctgactatagcctatagtggatctgactgtctgatgctgccaagttgacaaccattaatacttcagatatctgagaagggtatattctatccgaatctactaaaacgtaacagaagccagtccatatacagttagccacacccaagtttctccattaccgctggaggcagatgtctcaaagaacatgccacactgtctgccaacagcccctgatggattccccattgcctaaattccttttttttgcttttgactagcatttcaaccttttggggtccctaacttcgtcccaaagtcagcaggagggtccctaactgcatcccaaagagagcaggaagttgcatgggaaagaattcaccacccattttccctggttaaaatgctaagtcagaaacgactcccttgcattggggcactagagagacagcaattccattattggaatttaaaaaaaaatggaggaatgaagggaccagacccccatttcggcagccatgacagtaacacgtgcttgctatgaccttgtcttggttattaagaggtcagatgcctgccttgtggcaaggagccaatcagaagttagctggtggtgctatgctttatggctctgggtgtactttatggacaagtacacagcaatgacgcgcagggcatagcaaccaccctgggagggcctatgggccataacaaccaaatggccgatcaactcaaggcaagtcctccaagcctggaggcacaccaatcctgagcctgtgcgtacccctagacactccccttacactgccttacaagatcgttcagcagccggttcgaggtgtctttgctagccatccaccatggtgggtgggtaaaagatccaagctaacatggggttagctcattaaaaaacaataaagcctcatgctgtttgcataaaaaaatttactttattgatttttttcttgaaacaagttcacctatagctcaatttgggcttgaacttttgtgtaatgaaagatgaccttaatcattgatcatagaagtaaaattgtagcaagtaagtcaagatttgtattaatatttttaggttgtgtaactaaattaatgaatttagtttatgcactgatataatgactcaagagagcttttggtcattatgaaggagactggtttggacctcagaatgtaaattggaagtttgtgctcttctcacttcgcccaccaatcctgtatgccttgtaaatatccatactggacagcagaatgattctaggtctgtactcacactgtttggacatttcaaattatttctcttctacacaaaaggagactaaaatgtaatgtttgtaaaattttggagatattgtgtctgatttaatataatgtaaatgccatttctataaactaaacacattttattacctgagttattgaatacttgttaatttcaagatcattagtaactaccttttttaaagctaattgatgtatctctaatttaacctcacataatttctcttctcatttttgctacctaaaacaatgcatgtatatatgagtatttatatatataaaattgatgctcatttagtgagttcactctgctaaacttgtctaccaataccattttattgcagcaaatggaaatcatgtccttcttcaagtatgcttctagacaggcatcagtgaaatcaactgttaataggaaggcaattttttatgttacaagaaaattatttagccatctcaggataaaacagcaatgttttgtagtttagaaatatttttatcttatcagatcatggctgtaataacccacttaactaagctattgttgacttgaagaccatgttcattaatcaggagcccaagatgattaagtcatctatcaatgctgatgctggctggatgtatgaggtttcttgttgtcttgaccttggtgtgtcagatgctcagataaaaactgtgatagatctgggagcccatcctaactacctccaggccagagcagcccagagtgctcctaaggagagcaatatatttatccttctgctttcaatcatcttgagtttcttccataatatgccacttctgtcccaacactcaagctgagtttgttatttcttgtttatatccccaaagtcctttatagttgtgtctaatatggtccttagcatcatgtgttgcagacgtgtctgcctttgactgagtgatttcttcagtgtcttaggcagttttgactctcttcacctaatctcacaaatgccatagataagttatgaatcaaattaagtaattaaatacttttctctctggtttctcttgagattttgtttttacttttacttgtgtgtttatggttatggttggggctgtgtgtgggaatgtgcatatgagtgtaataattgtgtgtcttaatccctattctattgttgtgaagagacacacaaccacggcaattcttataaagagagcatttaattggggactagcttacagattcactctttgtccttttttagacattgctctggaaaagtagttaagagttacatcctgttcttcagacctagagagagacaccggacttgacatagaattttgaaacctcacagcccacctccagtgacactacaacaaggccacaccccaatccttttttgaaatagtgccattcactggtgattaagaagttaaatatatagccaaaggggacattgatattcaaactaccacactgatggagccaatagagggaggtaaaccacctggagctgtagttaattgtggttgtgaacaatttcatgtctggatgctacaaacaaaaacttggttctctggaaaagaagtatgtattctttactgctgatacatctctcaagccccctttgtctgttttaatgccactaatagtaaatattgatagaagaattgtgatctccaaattataatagaaagaaaaatgttattgaataacagcatgtatcaacaaatacctttgaaaggtagtcatttcaccatatttaaatgatataaacttgtctagttgtatcttgtcatttgagagcagaataacttctggaaaacagtttcattcttccatcagttttctcaactgaaaaatgaaatttttgcctggattttaagaaaactaagctgatggaagattagttataaatgttttgtaatctgcaatgtactgacaaagaatgttttttggaaaaacaattgtctgacaccaaatctgtggtggcaaaaatcccatgaaatctctcttagcaagagccttccacaggtattgatgatgctgacccactaccacctccatatgtgctggcaatgccctcccattgccaccctccaaatgtgctggtagtgtcctcccactaccaccctccatatgtgctgacactgcccaactactactgctctttagatgttctgacaatgctcacccactaccatgcttccctaccaatgatgacaaatcatccttgcctgtccagcaagggtttcattgactagcccctttccctttacctctgctgtgatttttccagaaaaatagagaggaatgtgtattcaccttatgtagtgtaccaatcacagaagaaaacaatgattctgtacaagcctagattagtgaatcagtgagtttattgaggttacttacagaagcattgttgagagatctcttacagtaatatggctgaaatggttatttataaaagcagcaatgagttgagcagctgcttcactggaaaaaccccaccaatgtgagtactcactcatgaaaacagggtttctggtgttgcctatataattttcaggtaggcacatggttctcctatccccaaactgttatcactgctcatataatcttgtgttctcttgtatgcttgtaactttcttgagagaatgcctccacttttcttcataagggagagtttcagcatgaagagaacagctgcacacaccacctctgataatccttctgagtgatttaccacacactgattcccgctctgctccaaggctataatttttgaacatagcatgctatattcggagctcagcccagttttatactaagatatgtttctctatagcattggctctgaatcaagcctttatccagattaaactagggagaagatccatgcttggtttctcttcaataacaaatgaggaaaggaaggctaccattgtgttgttcaaaactgttcatcatgtcagaataaggttttcttctcattggttaactacacttacaagtttcatggctggttatccctcccttttggaacaattactttttctggccacatccaccttggtgctcctccttggattctgaggcagtaccaccaaatatctttgaccccttaaaggtagagctggctgttaactgcccatcatcttcctgcctatgcctgtccttgaaaggaactcatttactttggtaacttgaaattcttcctgagtctaacaattcctaaagttctacttcaagcttcaatcgtccactaaattcaaatttgttcacctatacaacatcaacatctggcttataaatggaaccacaaacttattatgtccaaaactaaacacctgatctgtttctaactctcccaacttctgttcctgaagacttctcagacaaaattagtgtccaaacaatttagactccacccttcctcctacactcacatcaaagatcaatagaaaatcctactctttggtcagaactatcatatgtggctattctaacccatcttctgcatttgtgttcacccttcaggctactatcatctcctgctttcatttttattgcaactttgttttttttgttttctttttttattagaaaatctcaggtccctctctctcccttcctcccctacccccccaactacccattgttacgataaatctttctgccaaaagccaccgagccccaccgccacatgtttgctttatgcaagcttcccacccgagttagggcccaaatgaatacacagaaacttgtattatgttcaaagctgcttggccaatgactaggattctcatctactagctcagtctcatttatcaaaaatccatatattttataagacttatcttatcggatgccttattggcgtccctccttgctggtggatcacatcctgccactggagcaggagcagaggggaaaaaaaggggcccttcctgtttctccttcacttaaatatgagtttccttgctatgtcacttcctgcctggatcagcacttctctactccatctcccagaattctctttgactcctagtcccgtctacttgctgtctcattggccaaacagtattttatttaacaatcaataagataaacatacacagaagtactttccccatcaacccatcccacaagctttctggtccccaggaagtgtgaggccttctatatggggtcttcaaagtctgccatagaggccaacccctttgtgtctaggctcagggagtgtccctccatgtgggatgggctcctaaagtccattcctatgctagggataagtactgatccactacaagaagccccatagatgtccaaggtctcctcactgacacccacattcagggcatcttgatcagtcccatgctggtttctcagctatcagtctggggccaagaggtttcccttgttcaggtcagctctttctgtgggtttcagcagcctggtatggacccctttgctcatcagtccgccttctctgcatctggatttcagttcagttcaaggtttagctgtgggtgtctgcttctatttccaccagctgctggatgaaggctatatgatggcacatgaattagtcatcaatctcattatcaggagagggcatttaaggtagcctctcctctcttgcttagactgctagttggtgtcatctttgtagctttccagacatttccctagtgcctgatttctctttaaatctataatatctccctcaattataatatcttttatattgctctcttctattctgcccccaactcaacctccctgtcccataatatcttcctcactcctccccttctcattctgctagttactttccccctccccccatgcaactttcttgtagcagttttttaattgttttttctgcttcaatccttttctagtacttgtgaactcacagagctgtgtacttcataattattaaaagttaagaattttaaaataatattcaagtccctgtgttcccagaaaatggagatggtgacctctgacttctaccctgactctatccccatgtcttcctttatttccatcacactacttctcaactatatcatttatatttgagccttggggggcctggattatcttccctctacttgaacttgtgttttgtagtagttttctcccacataaaccattccatcttggacagatccattaagacacaggatcctctcctgaagactaaggaaataaacaaatcaaaagtttcaggaagtccctgaaactgacaagatgtgttagtcccatcactccctaagtttgtatgaacattaagaactgttaagccatcaatgatggcattaacctagatcattttaatgatgtagtgctgctcagatttctataatgtgcaattatccttctcctgatttataatttaatgtttggaatggaatcataattgtacccatgattaagcatggataattgttcttattgcatgaatttggagtatcttaaattgttcagcatggaagatcttgtgtatctgtttctgacttttctcttgtgctcttcattaatttcaaaaacatatgttgattattgtaacataagtcataaaattgatagtttgaattgtccaacttttttcttctatttccacattatctcagttattgtgattcttttatttttcctccttaacttcaaaaatcagtttattatttgaaatatattgatgtatttataaatataattttgactggtattcgattaaattaatgtattaaattaaaagaattaatcatttattgatctgtttgtttatttacttgtttatttatttttgtggtgctatgaatcaaagtgcagtcatcatggttgctactaattaaatgttctactactcccacaggcctgcctgatgttcaggcaggcaaaagacacccaaggagacagccagggtcctcaaggtctggcaatcctgaagcatccacaggcctacccagtgccttgtgaacttgggcagatgtgtgccattatgatgagcacatacatggtggagaaataggaaagacagagatggaacagtttgtatgctgtggtaagagattgacatggagaagcaagaagaatgggctgatgttggcagtctgcttaccacttgagactaggctagcatccagcctgggatgtaccataagggcatgtctgagtccatgattctaccgcagccagggtctgggttgatgccttaggctcctgttgtcactgggggctgagtagatacccaagggccagacaaccacctgagaccatgttggtatctggaggctttgctgttgacaatgctatacagttcaaggtggcctggggctccactaagaccatggtgatgtccgggcatgttgtctgaaatgttgccaagggcatgtctaggtccatgctcctgctgcagttggggtctgtgacgatgtcgatggccctagtaaccacagggtataataggaaccatgtcgttgcccagtccctcaatgaacctgggatacctagccctcgcctttgctggacacagcagcaagagagctgatcttgctcctccgcccaatgggagagctaactcctgtactctggaaagatggccctacccctcaccacaggcatgggagagctgccccctcccccaggcattggcaaaggaaagctggcccctcccttcacctaaggaggccatctcagtgattgggacctacaagttcagctcccattcagacccaaatcttggaccttggttgacccacattaatctaacctatctatgacatgctggagaacatgaaaggactgctcctatggaaagataaccacaggatctctatattcaggacaacagaagagtatcagagaggagttttggtgagggtccagtgataatagtgtgccacaggccttgaaccagaccaatgactcattgtaatgaacattttgtgtggggggctgattggacaaaggggtgtactgcctgacacaatttagatcctgatgtcaccagggtgaatgaataggaaagatagaagagcaaagtgggctttttgtttgtttgttttgtttgtaattaatttgggggcatgctgcaagagtgaggggcagatattaactaggaggtgagcaagattggagtgcatgtgtgaaattcccagaggatcaaaaaattatgtgtaaaattcccaaataattaataaagaattatgcttaaaaaatctactgctatgaaatgtccagaccttggctttacaaggcagtaaactctgtagttcatactagtctcagacttttgatcctccagttttatttaccaactgcctaggaatagacctctttgaaacattgagtgttaatggatgtgtaatgtactatggctccatgtgtttagatttcagattcataaatcagtaattgacaacattatgaacacagattctacatgtgtttttgagttttatacgtaatttctttagaagcaatcatctcctgtaaatttagcttataaagatatattaaaaggaggtctctgggatttttatttatgttgagcctctatcagaaatatttatctttatattttcaatacagtaatgcaaacattcaagttcagtgttatggtcttcaagatagaatgtagcagtgagtatatctcactaaagttctagaaacattaaaataggagtgaaggaactggaaaacctggcgagagtgcaaagaatatacccttgttttggttcagccactcaaagcctcacttgacctagttacttcttagttcaccctgggaatcatataagctgtgataaagaattttgaaaacttaaccctccataatcaatacattcaaccgtgaagctacaaatacttttagtgtctgttgctcttgcttcttatgagaataaattgatggagcactaagtgctctgtatgaaactcaagaccacgccctgtctacctccttctgctatatatgactgccaaaattatctccttaatttttatcagacataataatgtgcttgaatccagactaaaaatatgcatttataagctgttagtgtgaggaacagctggtgtgcccttaaaatagtatattatatgcattgctcctcataaatattttaaaactcccattaaaggggaaaaaagaaaactttagccaacaaatctattttaaagtcacagcatttttgtagcagcatatttcatggatattgaaatttgagagaacaaatagagagttacaaatgagatctaaagggaagcatcactattaatggaagtccatttttcacttcgatgctgtaaagatcagcaatgatctacacagaatattatcccaaacttgaataaatcctctgccctcaaaagcacctaagatagacttggggccattgtggaaaaacttatcttttaccttgcctttataacatctcggttatatatctgtttgcctataatatgcctaatgtacatctctgtgcatggctgaaagtagaatctattgccacagggtttggaaatttaataacaatttttctccatactccagaagaattgaaatggccagaggaatcgtcaaatgcaaacataatattagtgacagctgatagcttctcacctcttaccacagaggagatggtctacagaatctgcagcttttgaagtgtgtcctaatgtttaccttgatttatttggcttcaagtcaactctcagcccccattctcaattggcaggcattcatcttcagcagggaaacttccaaaagaacttcaaatcagtcattcacttttcatcagaccggtaaaattttatctcaggcaattgacattataaacgttaagaagctttacaaataagtaaactgaactcaacaggataatctctcattaataaaggaaatgcaagagattgagattggtacacagaaagtaattaagtgggactgaaaatgttaactcctggaaatgttctggtggattctacattcatagatttataatctatcattaaagttgagaatattaggtaggccacttaccataaggagctactcagttcatgtgtgatagcaattttgggtccctccacatataattaattctggcaatacaaaatggctgtggtgaaaaatagtaaattgggaaatttagatgcattaagaacacattcttagatctttgcaacttttctcttattgtgtttaatattggcattagtagaccccactgaatgggcatttcctacattcactgtgccaattaatctcttaactccaatttactcattgctaatgctgatataattaaggtatgggaagtcttcattttatggctgataacacttatcaaaagaggttagaacacttgggaaacatcttacttcatatatatttggggttcaggacagagatcaagcttgaaaagactcagccatgtttttaaagaataactgagattagttgtagggcaggagagatgtcttcatgcactgctcacccagatgacctgagttcagttcctagaaactgtattgggtgacacacggctgcctgtaactccacatatggagaatttgacagcctgttctagattctgtggaaacctccatacatgtggcatgtatacacataaagacacatgatcatatacagcagggaaaatgaaaacagatgttaagggtctagagagatggctcaatggctaaaagcacaccataaggcccacttttttatttaaacaaaaatttatccttctacttgatgttactgtgaatataattccagttgcctgggatctgacatccttaagaggaacttcatattatgcatctatgatacatagatataattagaaaaacacccatacatataagataatattttttatttaaatcttaaaattcccttgtttatcagacttatgcttggcactgcaatgggtgagaaagttgaattcatcaagtttgcacatttatttacttagagagtctaaaacacaaaaagaaaacttggaggtagtataaatttactgaaataaattatgaatgattatgagatttagagctactgtatatgtaaaatactgtacccaggggtgatattacagcatacactataagggactctaaaattgtaggtagaaaaagatctcatatgacgtcccaggaatcctaagtataatgaacagacacagtgatatgaaaagcaaagacatcaatatgaaagtaaggctatggagtttgtagcaattggcagagatttatacactggttgcaaccaaagagtatggaaatcagaatgtgttgaggaaggtaagcaggcactctattgaattagaaatcagttttcaaaataatgtcgcttgagggaaagaacatttgagaacattctgctatttcattttaggaagaaagctctttggttggattaggctgaagacttgtgagttttttgactttaaatgtttcagcaaacaactcaaactcactcagtcattgtagaaatcaaagccatccttatgtcttgctaattgtcaaaagccttcacctgaatacccccatatacaggcccaccctatccagaacaccctcagtgtcttcagtgtcttggttatgaagtgtctttaggatacccggttgcagctttactcactgatccattgagtaaaagcatgtacagctacagcatgtaagactctagttgtcagcagaccctgggcagttccttatcaccatatcctaggagtgctaaactttgtgctcctttgggtaaagcaaaaaccaaacaacaacaacaacaacaacaacaaaaaacaaaaaagaagaagaaaatacagatcaaatatcttactgtattcataacagcagaagttcacaagcagaagtagcagccatgggaacttgtgcatgtgtatttccctttgccttaatgcgctctaatttgacttctaggggttatttattcatatagatctttattattcctgtggcattacctttctagttgatactattttaaatataatatggcagagtttactgatcaatattctttcaaatcaagtcatcacaggcatagttatgcaaaagtctgcaattcactagtatgtttcatggtaaatttgtctaaatagacaacaaattcattgctttcttcgtctctaattttttttcaaacttaaaataacatcacatatatgtggaacatagacacttttagccatactgtaagtcttgccatgcttttttagtgacattgttttgctgctataaatctatcaacatataggtaattgccaaattttcatcttgtcttcctgggaagaaatacattatctgggagaaataagaatcagtttcattaaaatctttggaccccagtggtccagttgtgctgttgattctcacagcagtcctatgcatctctccctgggtacctgggatgttgaagtcaattacagggaaatacatgataaagagaatgtacttgaatataagatgctgaagaagggaagggcaaattttttagtgatctaagggatactggaactatagtactcctacttattaagtgttgtcagcaagcaaaatgtaagatatggataaatccctctacaacaggtttgacagtttagagaagttggaaaacatttcatcacgggaaacaatgagtatttggggcttagtagggcagagtccattgcaattgcttgtctctgtttctatagtttgaaagaatccaaaagtactatttgtgaggctgaatctataatcaatcaaggcataaagcaggtacatctgtgaggaattttcttggtcatgttacttgaaaaggaaagaacctccctaaatgggttggtagctcattttaaaggaggtctgggggaacagcttgatttttgcctgttagtcatggtgtctctctggtaagtttgactatcctatattccagttcatctacagtcaccgctatggttactgccacttctgctacagtcctccactcatacaaagctcttcaggactccaacacagattgacatctgtaaggagagacctctattcacctgtggcactgaccattatagaagaatacaaggtctagtcagtgatagtttaataattggtagtttattaatggaaaatactcacccaagagagccagtgagcaggtctgcacttgagcaggatagacctagaaatgcttcccagtcagctcagcctagcaagagagcctcgggctaacctcccagcatcttaaacctgttacatagctgtgaccatgcccaagcaggcatggtcagtggtacctgtaatcaaggtcacttcctgtaggccatgcccatttgggcatggccacaggtgcataaggggtgtgtgggataaagatcagaggagagaggcactttgctctctctcagggttccattcaggtctcagagagatgctgacactggattctcagaatgccagtctgggttatccgtttctcatgtaagaaataaataataaataaataaataaataaataaataaataaataaataaataaccaacaatatccatgtcccacgtacagtgaatttcctcaacatatatgtgtatatatagttatattgctgtaatcttggtccttgcttaattatttaggaagcttaagcctttgtacaacgggttcctgagaattataggcattttcacctacatttttatacctattagtcagacaaagattttgatcttcaaacacttcatagacctgcagaatatggcatttaaatgttttaatattagtactctgttgacatgaggcacaattgctcttcacagcacccagctattgcaaaaaaaaaaaattgttgggcaaacatgtcactccttctggagtggattgtctcctcagctaatggcctgttaggcaaagaacgcccccacttcaaccactgactttggacatgctgtcctactgtgcttgcaggaaataatttagaagactgctgcccccattcttcttggtgctggaaaggatgaaccttgccaagtcaggttgagacagcctttctacctccctatttatgttttggtcagtctgatattctaggccttagccaaagctggttgtccctatgcttctgtgagactttgggtaactgtgaagcctgatgtttctgtcttcgctgctgcacctttggaagtttctcacctgagcttcctgcctatcctagtattgttatcttccatctcaggtatttgatgaggttgaagatttggctatcacaattactgttctctttccttagaaatattagataggagacttaaactttccagcttagtacagctctatagcaatctctgttatgcctttaccctaggattggatatgtagttcttgtcatttgctcttgttgttttactggctttagatcttgagggtgtatgttcatactctaccttctcctggtgcatacttgaattttgccctctttgtatatagttttgtataaagtgaatcctttagactaaaaggggaattgtagcgacagacctctacacaggtgtggcactgatcatactcgtttgggtgtggtcacaggttcataagggacatgtgagataaagatcagaggagaggggtacttggttctctctcggcgttctctgaaactggattctcagagcaccaatctgggttatcggttcctcatgtaaatgatcttccctgaataaataaccaataatatccatatcccatgtacagtgaattttctctacagacatccatggctctacagtaatcctcctgaccatcaacactattctgtgactgtagccttatggactaacacttactgggtgtctctcacttgtgaaagcaaccatgtttggattgtccagactactaagtattaaccagtgcaatgcatccccttttgatctacgtgagaactccaactaacataagtcagtggatgcggctgtattctagtgatactggctttggtccagccagtttctccactgttgctttcccacatcattaaacacttttttttgaatagttgttttcatacaatacattctgattatagtttctccttccccagttcctcccagatcctcggcacttctctagtcaaccaaatccatgctcttttatctcacagcataatacaaacaagcacctaaagttagtaattgtgatcatcaccatcatactaatgataatcaagctagaataagacaaaacaaacagaaaaaaaaaagatccaaaggaaaagcacaagaaacacatgtacaagccgaaacacacacattcagttgcacacacagaaaaccaataaaaataggaaaccataatatttatcaaacagggtctaatctatatttttatgaataaagttgtgttacaacacaccaaaattcatttgcttgcaaatcattcattgttgttttcacataataagagaacaaatgaatagattgcaatagaaatgatgtggtatttatcactaaatactaaagtatttactaatgagctgtttctagaaattttatgtgagttctgaggtcagcccagttctactattcactctcatcaagttacgatcaagttaatttgcctttctatgtcccagtttgtttagccttgaaaagtgatgtgcacacaacattctgagctgagcttagcaggtaggcactctaatcttaactgctgcaataacttcttcttagggagtaccctgtcatcaaggaaaactttatatgttctggcattaatagaaatgtgaatacattacccagcagttgttcacttagtctatgtcacagagtttacgaaatgccttacaggcatcttttttaattcttatgatagtcttatgaaatattagttgatacaatagaacaacagcaccataaacattcataattacatgcaaacatctcaaacaatagcaatgtgctcagaagttagctatcttcacactgtgttttccttgggatattggagaaggaacaaggctctgtctgtcactgtgttgagaggaatctgaggctcatcctttccctgtaagggggaattgaacttacatttatgtaaccattactttcaaaagttttgtgaaatattcatcatctgtaatgtttatttaaacttgaactaatgtttataacccacattagatatttgtgagcaatatcaagtgaccttgcacttctcctcagaagactgtatgtggtgtgtggactttgagaatggtaagtaatctactgaaatagtagggaactcagaggcagcaaggaaaaaagaagcttatgatggacacccatttaaaaaaaaagtcaacatttccaaaatattgaaatattgccaatttactgatttctcgaattccatacaagattgtcagtactagtattttaagatatgctttctgtttgaaaattatttctttatattttcttccaataagcacacaactgtggaaatccaggcagtctttaagctgtaagctgcccccattcttcttggtgctggaaaggatacggtgatgatggtgtagaaaggcagcaacttttgactccattaaacacacatataaagagctctaattgtaattaatgggctggaaatatggaaaaatgaaaaaaagatataaatgagggagggaactatgttggaaagtccatgaaaattgaagggaggtaggggagtgaattagattgggatgcattgtagacatgtctgaaattatcaaagaagaaacaagaagtaacttaagaagagaaagaacagcaactagggatatagctcaatagtagtgttttcctgtcatgggcaaggttctatgttccaacactggcaccacaaaattaatacaaataaacaagactaaaaatagaaactaacatagcaaatcgatggtagtattttatgtgtctctctgagttcaaaaactatgaagaggtagagaaaacatgggtacagatagaatagaaattgattatttgagaaccaatgaactattctgatcacacattcatttcggttcaaagtcaaagatctttctccactgcttttccagagctgctgcttgcactggcaataaaatgatgtatcccttccagacattttgtttctctacccacctgaccatgataggtggaagtacactaaaatttctatagaaaaaaatactctgtccatattttctacaggaattacagttctaagtgacttaagtgggttgtaaaatagagtagtcaatttcaaatgtggtggaaaatgatcaagaattaatgaattatcagcacagcttacctcatcagatgtgtttcagacaaaactgcacaaacatggctattcaccacagcaacatctataatcagtaaaacgttttcaattgggttatagatgatggactttgtaattccttatatttttccttatttgatgtttaataaaaagaaatcaatcatgacatccccatttatggataaaacaaaatgtaatttagtatgaaatcatgagtctttgcagttagtgagaatgttgtaaatcgttcttagcatatcacagttcatttttatattatataagaaaaatcatctctgtagaaaaattgaattttaccatcaataacaacttacacaaatgaattagtgtactaagaaacaaggttatccttatattaaaaatggtaaattgacatgtaatggatacaatattcacctacattaataaactaaattatttataaatagactaaagcatttagggtttaatgaaaccagtcaaaaaatctggaagtaagatcagagttggaaaaattggagtaggatgacttcacaaaataaatataagtagatactttctaggctattggcttctaaattccactgtgggcacaaaggaggaacacatttattcatggaaaagccagaaaatcctcagcccccacttggcatttaaaaatgcacatacatgtcagttgacaagcaaaattgcttctacggagacagcattattttcatgaatcaatacaaacataactgaatgggtgtcattgtaagtctccaaccaggatatttttcagcctgctttgctttgtattattatatgaggccaggatctctggagaaaaaaaaaaaaagaaaaacttttaaaaaaataacaggacaacattattaaaattttttgacttcttttatttgaattacaaacaagattgaattacatgacaatcccagttacctctccctcccttcctcccctactgtgccccccaactaaaacccaacctttcttctaatctacacctgactcaaactttctgcttcctcatgatctttgcattcttccttttcttcccttctcattcttgtagctccttccccccacttcccaagttctcaatttgctcaggggatggtgaccctttcctcttctccaggggacaaagtttgtctcttttaggctcctccttgtttactagtttctctggcagtgtggattgtaggctagttgtccttgagtgagtacatatgtttgtcttgctcagaatggtttcttccagttccatccattgtcttgtaaatttcaagattccttttttttttctcctgactactactccattgtgtaaatgtaccacaatttctctatcaatttttcaggtgaggggtatctaggctgcttacagtttctggctattacaaatagtgctgctaagaacatcattgaatagatgtctttgttgtatgaatgtgcttcttttgggtatatgcctaggagtggaattgctggatcttgtgttagaatcattcccattttcttgaggagatgccatactgatttccaaagtggttgtgcaagttggcacacccaccagcagtggaggagtgttcccatttctccacatcctctccaccataaactgtcattggtgtttttgattgtaggcattctgacaggagtaagatggtatctcagagttgttttgatttgcatttccttgaaggctaaggatgttgaacactttcttatgtgtctttcagccattttagattcctttattgagaattgtctatttagttctgtaccccacagtttaattggattatttggtgttttggagactagcttcttgagttctttgtatattttggagatcagccatctgttaaatgtggagttggtaaatacatttttctagtctgtgggctgccgttttgtcttgctgattgtgtcctttgccttacagaagcttctcagtttcaggaagtcacatttattaattgttgatctcagcgtctgtgctactggtgttatgttcaggaataggtcttcagtaccaattaattcaagggtatttcccactttatcttcaggtaggttcagtgtggctaggttcatgttgaggtctttgatccattttgacttatgttttgtgcagggcaaaaggcttgggtctatctgtagtcttctacctgtttgcatcaagttatgccactaccatttgttgaagatgttctctttgttccagcatatatattttgattgtttgtcaaaaatcaggtgttcgtaggtgtgtgggttaatatcagggttttcaactctattccattggtctacctgtctatttttgtgccaataccaagctgttttcaggactatagctctgtaatagaacttgaagtcagtaatagagcttgaagtcagggatggtgatgcctccagaatttcctttattatccagggttgttttggctatcctgggtcttttgtttctccatataatgttgagaattgttctttaaaggtcagtgaagaattgtattgggattttgatggggattgcattatctgtatatggcttttggcaaaattgccatttttactctgttgatcctgcctatgcaagagcatgagagatcttcccattttctggtatcttctttaatttctttctttagagactcaaaattcttatggtacaggtctttcacttttttggttagtgttaccccaagatattttatgttgtttgtggcaattgtaaagggtgatgtttctctgatttcttcctccaccaatgtgtcattggtatatagtagaacaactgatttttttttgagttaatcttgtatcctgccactttgctgaaggtctttatcacctgtaagagttttttagggtcatttctgtagactctcatatcatctgcaaatagtgagagtttgacttcttcctttctaatttgtattcccttgatctccttttgttgtcttattgctctagctaggtattcaagcacaatattgaagaggtgttgacagagtggacagctatgtcttgtccctgattttagaggcattgcattgagtttctctccatttaatttgatgttggccgtcggcttgctgtgtactgcttttattatgttgaggtatgttcctgttatcccagatttctccaagacctttatcatgaaggggtgttggattttttcaaatgctttttcagcatctagtgagatgatcatgtgttttttttttttccctcagtctgtttatatggtggattacattgatgtattttagtatgttgaaccatttttgcatccctgggatgaagcctacttgttcatgatggatgatttctctgatgtgttcttggattcgatttgccaatatattattgagaatttttgcatcgatgttcatgaaggatattggtctgtatttctatatcttagttgtgtccttgtgtggcttggctatcaaggttattgaagcctcataaaaagagtttggtaatgacccttctgcttctattgtgtggaatactttgaggagaattggtattagctgtactttgaatttctgatacaattctgcagtgaatgcatctggccccagcctttttttggttgggagacttctgatgactgcttctatttcattagggtttataggtttatttaatttgcttatctgttcttgatttaattttggtaagtgaaatctgtccagaaaattgtccatttcctttagatttttgaattttgaggaataaaagttttcgaagtatgacctgatgattctatggattttcactgtctattgttatatccccattttcattcctgattttattaatttgcatattcactctttgttgtttggtaagtttggataaatgtttatctatcttgtttattttctagaagaaaaactcattgttatattgattctttgtattgttctcctagtttccattttattgattgcagccctcaatttgattatttcctggcatatatacctctggggtatattggcttctttgttttctttcttttttcttttcttttttttttcagacagggtttccctgtggctttggagactgtcctgtaactagctcctgtagatcaggctggtcttgaactcacacctgcctctgcctcccaagtgcttggtttaaaggcatgcgccaacaatgcctggccgagcttctgtgttttctaaagctttcagttgtgctgttaattctccagtgtgattattctcctgtttcttcatgtgggcatttagcgctatgaactttcctcttagcactgctttcaaagtatcccataggtttgcctatgttgtgtctgcattttcattgaattctaggaaatctttaatttctttttttatttattcctggacccatgaattgtgcaattgggtgttacttaatttccatgattttgtaggttttctgtagtttgttttgtggttgaatgctaattttaaagcgtggtggtctgataagacacagggggttatttcaattgtttgtacctgttgagatttgctatgttgccaagtatgtggttgattttagagaaggtccatgtggcgctgagaaggaggtaaattgttttgtatttggatggaatgttctatagatatctgttaagttcaattgcgccataacttctattagttcttctgtttcttttttaaatttctgtctggtgttcctgtccagtggtgagagtggggtgttgaagtcttctcctataagtgtgggtgttttaatgtgtgaattgagttttagtaatgtttctttcacaaaagtggatgcctttgtatttggggcataaatattcagaattgagacttcatcctgatggatttctgctgtgatgagtaggaaatgaccttcttcatctcttttgattaattttagtttaaagtccatttttttggatattaggattgctacccctgcttgtttcttgggtccatttgattggaaaacctttccccaatctttattcttaggtaccatctgcctttgaatttgaggtgtgtttcttgtatacagcataaggattctgccttcttatccattctgctaatctgtgtctttttataggggagttaagaccattaatgtcaatggatattaatgaccattaattgttcattcttgtttttttatgatttggtgatggtagcgaaattatgtgtcggattctatcccttttaccttttggctgttagtaaagtggggttctccattgcctatatttttctggtcgtaattaacttccttggcttgcagttttccttccagaactttctgtagggctggatgggtggatatgtattgtttgaatcttgttttgtcatggaatatcttgttttctccatctataataattgaaagctttgctgggtatagtagtctgggttggcatccattgtctcttagtgaaggtagaatatctatccaggaccttctggctttcagagtttccatggaaattcaggtatgattctaataggtttgcctttataggttacttgacctttttcctttgctgctgttaatattttctctttgttctgatgtttgtgttttgattattatgtggcaaggagaccttttttggttcagtctatttggtgttgtgtaggctacttgtattttcattggcatgtctttctttagggtgggaaagtttcttctatgattttgttgaatatgttttctgcacctttgagttggatttcttcaccttcctctatatctattattctttggtttggtcttttcatggtgtcccatatttcctggatatttggtgttagggatttgtttatttaagattttcttcagttggaatctatttccgctagtgtgccttcaactcctgagattctctcttccatctcttgtattctattggttatgcttacatttgtagttcctgatcatttacccagcttttctatttccagaattccctcagtttgtgctttctttgttgtctctatttcagtttttaggtcttgaactgtttccttgagatttttgttgatatcttgtatgttttggtttgtttttttcttccatttctttaaaggattttctcatgtcctctgtgaggtcttgtatcattttctgaaggtgtttttaaggtcattctcttctggttcatctgcattatgatgttcaggtcttgctagtatatggatcctaatctccagaggtgtcacattgagttttctgttgttgaatgtgcttttactttgtcctcttctcatcctttcttcttttgactgtagcaggagttttttgctctcctggtgggtatgtgaccaaggttttcttctggtagatgcaaacagatccattactctgatgtctgtcttcttcttgtggatggagttgtcactattacgggggcattgacagtgttcgggtgtgttgggaccctctgggctggcagatggagatagaactgccaaagggtgatcagtgtgtcagatccggcctcggaattaggtccagagtgcagattgctggtgtcagatgactctgagcagtgacaaatgggatctggaaactggaaacaccccctggcctacctgggccagctgatggctgcattgctgccaccgggcctacgtgtgtcggattccgctgccgaattgggtccagcgcagatccctggtgtcagatgactctgagcagtgacaaggaatgggaactggaaaatttttacaatgcaaaattattcagaattggaatgttctagactgtagaacaacacacaagccatttacattttaataaaacctttaaaacttactagtggttgtgagcatgtatatggtgtatgaacatggtatatgcacacatttgagtttgggtgtgcacagctacaaatggatatggaggtcagaaagttcagaatattgagtgttctgatctgtcactttttgccttgttcccctgagacagggtctttctgtaaacctggagtacttgacatgtaggctatcctggaagtcagcaaacctttggggtacttttatctctgcccccaacagcactggagttctggatttgtgaaacctcacctaacattttacataggttttgatgactgaaggcaggacctcatgcttgcagtgtagcctctgagccattttcctataggggaagctgtagccacgcctacttaggggctggctacaggtgtacctaaccacgctttcgagaccgtggtcagggtgacatagagcaatactgcattttctctttcggtttcactttggttcttgctggacagactgctgccacaccggctggctaggtcgctctgtaagtaaggcttttctttattaaatacccttatatttctaccagactccatattggtaatttcccactattttttcccaatatttttccattaaaataccaaaaatcaatttaattgaagtgtcacctctctcaatgaaacgtctaaaactaagttgttttcatatttttatttgtttgtttccctaaaagagctgtgtatctctaatgaatttttaacacattttaaaactgaactccagtattcttttaaaagatatgagggatatttttctattgctacttttttctttacaattttttcaatgtacagacaacatacaaaactttgctgtaattttatagtttaatagtacctctctaacttgaagagaattgttggttggagatgtaatttgtgtaatatgtaataaatataatgcctatatattataatatgtaactttaaatcaatgtttaatatacatgatatactttgaaaatacgtaaccaataattataagcaccatacagtcaaccacactatttcttctaaataattatacataagttcattcatatacatggtttatatagcaatacacatattgaacataattgtttatagaataaaagatgactaattctacttactgaattctccttgtaaaaagatagctagggtgaaatgtgagcatattcctttattctgtcataagaatgatgctagaaaagttcagttatttctattgagacttgtaccacagtgataggattttcatcccaaaagtgatacctgaaatagatgaagaacagaatgccgggcaaatggataagctaatgagaagttccagcaccatgctacaactttcagagactgtgattcttctaccaaccacacacacagtacatttaatttatgccccaaatgataaagagcttgaatgttaagaaataactatctttcaactagtgttctacttgaggggaatggaatcaatcttatcctggaaacaatcaggagctgggtgtattagttacttttctgttgctgtgataaattgtcctcaccaaaaacatcttgtaatggaagaacttgtttcccttatggtttcaaaagaagagttcataatggcagaagaggaattgtgtcaggggcctggagtaggatgctgagagatcacatcttcaacaagcaccaagcagagaatgaactggaagtgaggtggggctatgaactctcaaacacactccagtgatgcactttctccagaaaaggtcttacagctacccaaacaacaccatcaactgggaccatatattcaaactggtgagcctaagaggaacatctcttgtccaagccacctacacaatcaaggtgtcttttcctgatactgtgatacaatgtcatgaaaaaaaaaatacttcaatggtgatggtgcttcttttggctcacatttcaagggtacactccattatcatgaggaagtcaaagtggcaggagcattacattgtgttcacagtcaagaatgataggccagtgcatgctgatgttcactctgacttctgcattttaagcagtgcaatatcctggctcagagagtgttatgcacatggttcaaacaggccttctcaactaattaaaccataaagatagtccctcacaggatgctttgtggctacataacccctaaaggtaggtatgtagcttgtcttctcatcaattctagatctgacattgaccatcaacactaagaacaagagaggaacgattacatgacaaatgttttggtgagatgggactcattcatgctcataggtgtgactaatagtcataatgtaaaaaaatattttatacaaatcttctattacatctggatatagttcacatttttcaatcgccccaatttatttgttttttaatggaaaacatgttttttcatatagtacacttagcatatgttatctcctccctgaaataccccctgtattatccccaccaaaatctacaccctattttgagatgtattttcttttttttaagtcattttttaaaatttaaattagaaacaagcttgttatacatgtcaatgccagttctatctccctcctctccatccctgcccccactgacgccttatcccatcccctttctcctccccataatgatgaagccttccctgggagatattcaccaaatctacaccctttctttctctctttcactaggataccaacagatttctaaaacaatcataataataataataaaataagataaaataaaaataaacaaaccagaattagggcagcacaaacaaaagaaaaatgttcaaaaaagtaaaagaaatgcatactgatccagacacacaaattcacatatacaaaaatcctataaaagtaaaaagtaggaaatgatgatatatatgaaaaggaaagtaagggggaaattctgacaaagcattatgacacaaggaaactccaaaatatatcattgaccttattttgtgatggacatctactcctggacatagggctgtccctaagagtggtttttgatcccagtaatttacatgttttaatatatggcacactctatattttactgtatctaaatgaaaacccttttcatggccaatgtcaaatgaaagatacagacactaaatgattaatgcaatgtgaataattaaaagtagcatttatctgacaaggaataagactaagaaattcacattacttatatagaaaacacatctccctctacaggaaatagtcaaagtccaatatcacctcattgttgctacatagtcaatacattgtagctcctaatctgatacttttttgtataagatggcaaacaacatgagctttgaagtccctaaaaaatcataacatcttctatactcttaccccccattagattgagaaatttagcaaatatttatgtttgtatttgagtatcaattaaatcagcttccattattccttagcaaagtgggatgtttgttgtctatttcatgaattactacatactctctcctacagggcccatttgcctcatttctataagattaaacactatgtctcatagaatcatgtctcagaatttattcaaaatcatttaggctgatttctctttaaacctataatgtctccctgtattatattatctcttatcttgctctcttcaattttatgtaattgatttcttctgcaagcacttctgtgaaaatcatgtcttcctcacccttcttctccacttctcattctcctagttccctctcctctctccccatgctcccaatttactcagcagatcttgcccctttccccttctccaggggaccatgtatgtctctcttaaggtgctccttctttaccagcctccctggcagcatggtctgcaggctggcaaccctttactctatatctaaaatccacatatgagtgagtacatactatgcatgtctttttgtgactgggttacctcgctcagaatggtttcttctagttccacccatttgcctgagaatttcaagattcccttgcttccccccccccccccccccactgagtagtactcccataaatgtaccacattttctctatgcattcttcagttgaggggcatctaggttgtttccaggttctggctattacaaataatgctttgatgatgatcgctgaacagatgtccttgttgtatgaatgtgcttcttttgggtatatgcctaagagtggaactgctggaaattgtggtagcctgattcccattctactgaggaatcgccatactgatttccaacgtggctgcatgagttggcactcccaccagcagtggaggagcgttcccctttctccacatcctctccagcatgaactgtcattggtgtttttcattttagccattctgacaagagtaagatggcatctcagagttgttttgatttgcatttccctgatggctaagaatgttgaacacttcttatgtgtctttcagccatttagattcctctattaagaattgtctatttagttctgtaccccactttttaattggattatttggtgttttggagtctagctttttgagctcttcttaaattttggagatcagacctctgtgagacatcggttgtcattttgtcttgttgactgtgccatttgccttacagaagcttctcagtttcaggtggtcccatttattaattgttgatctcagtgtctgtgctactggtgttatgttcaagaagtggtctcctttcctaattcgttcaagggtatttcctaatttctcttctaataagtttcagtgtggatgggtttatgttgaagtctttgatccactgggacttaagttttgtgtatggctatagacatggatctatctgcagtcttgtacatcctagcatccagttatgtcagcaccatttggtgaagatgctttctttattccattgtatagctttagcttccttgtcaaaaatcaggtgttcataggtgtgtgggttaatatcagggttttcaacttgattccattggtatacctgtctatttttgtgccaataccaagctgttttcaggagtacagctctatatttcaagtagagcttgaaatcagggatggtgatgcctctggaagttcttatatggtacagggttgtttgtctattctggatcttttgtttttccatataaattgagaattgttttttcaaggtctgtgaagaaatatctagagagctacaaagaagataccaagtaacaatctaagcaacagaggggaggctgccttaaatgccctcttctgataaagagatttatggctaattaatatgccatagtacagccttcatccagaagctgttggaagtagaagcagaaacccacagctaaaccttgaactaaactgaaatccagttgaagagaaggaggattgatgagcaaagtggtccataccaggctggtaaaaaccacagaaacagatgacctgaacaagggagagctcttggccccagactgatagctgggaagccagcatgggactgatccagatgctctgaatgtgggtgtcagtgaggagaccttggaaatctatggggcctcttgtagtggatcagtacttatccctagcataggaattgactttgagagtccatcccacattgggggatactccctgagcctgggacacaagggtttggcctaagccctatcccaaagaatatgatagattttgaagaccacctatggaaggcctcacaccctctagggagcataaagggtatggaatatttagggtattagttcagggggcaggagaggaggggaggtacagggacctgggattgacatgtaaaataattttctttctaacaacaacaaaacatttaggatcctggacagatgatttggtgattaagagttgttgctgcatttccagagtattggggttcagttttcagcacccaaactgggtgattgaagccacagaagatctggctccatctttgggcctccatgggcacctgcacccaggtacacatatcctctatacaattatatgcaagtaaaataaaacaaatcttaaagctcaatttacctaaagtagtccccttctcataaaaattctgatccattttatgctgattttcctatgattatttttacctcaagccttctgccttcttagataaccgtgcatgctctatgatgttgctaaataaaggactctatggcatcaataaccatgatttctttatgttctttttcctttttcttgttgttgtttgcttcttttatgtttttcctttgttgtttgtttgatgttcattttggtcatcatctcttactactatttgagaagatgaatggatgaaatttgatctgatcttctccaagaaggttgcgtcactgaaagaagatgaccttaaggaaactttaccatggcctctgacattctttcctgttttatgattacatatagagaatgatgatgaagtatattcattaaattttaagtgcaaaagggccatgcacaaaaacaatcagaattcacagtggccttttaattttatgcaacatatgttttacaaagagctgttcacagaaaatgttcttgtgctataaaataaacaaaaaggatcccaaggaccaaagcagtagttattaaacatttttaatgaggtggaactccagacatcagtaacttctaagatctaccctcaatgattttatgcagtgatatgtccatatttcatgaccactgatttggtgatctggactaaagaaaaataacaacagtatatgttatgtccaagaaatcatttcctctcttaatttaagtgtttctatacattcctagttagaaaatcaggaaacagaattttcatttcaggattaataaattcttgtaatgattgtgacagcaagcattcattcaaggtagtaagtagattatagctaagataagatcttacttagtcttcagaataataatctatatttaatctttttagagatgataaattattctccataaaattaaggcactggcctgggctttggtggtgcacgcctttaatcccagcacttgggaggcagaggcaggcagatctctgtgattccgaggccagcctggtctccagagaaagtgccaggataggctccaaagctacacagagaaaccctgtctcgaaaaaattaaggcacttttccaaacaatgagtatgaagaccaggagcacaactgaatcccctcactatctcatatctcttctgtctctgtctgtctctctgattttctctgtctctttgtttgctctgtctttgtctgtttctctgtgtctctgtttctgtctgtcagtctctgtctctctttttctctctttccaccttattccattttgcaaactgaagaaggcagggcatgctttattttctcaaaggactgaatgtgcttactgaagaatacaagctttcttcataaaacccaataatatgcagacagtaagtgttagataaagtgtggccacttgccctgtcaggttctacattaacacatataaaggtaagtctcatggacctctcactcccttcccagtctaccacctcttacagcactgacaccatgacaacttcaaagattaataacctctcatctttttttcagttctttccttctgattttggaatagaagttaattttcaagactccctttgacatcttgatgcttatgcagttttgtgactgtcctctgatttgaaatgaaactgctggggaaggggtaggaatagagacttcaactggaaagtgtttcactctgtctaatttctctctttgaatataatcatgtacttggcatcacatacaatagcacaatgtttatattgaaaatcattggcttcgaaccactgttcatatctacactaaaaggaaaattctatctgtgcttgttcattcaacatgttcaatcaattaaaatggtaatctaatttttatacaacctttgaaagtttgggaagagctggctctctgaaggccacagtgtcatcaaaaacatggaaagcctaagtctggatattcaatagcaagaccttcatgtagaaaggaaccccatccatcagtatggaataaatgataccatttcatttcccatccacacaagttgaatctcttacagtttcctgacatgaggtaatatttttactgaaatacacaattattttcatctaaatccgatgggaatgttaaaacactggaaaaaaaaggaaagcaaactgaatggctaccaaacagatctaaccacaatttctataaattaccttctgtggttgtttttcttctcttctacatggttgcccctcatgtgctgggatcaaggtggtctctatctgaattatgacacttttcttggaaaagaaaaataataaccccatgtgtttgtaatccttgaatgccaagtgtttactttgaaatcatgagcactatttgctcttctacagtatgtcagtgagttttcaacttccaaattctcacaacttctgcagtgtgttcccaactccagtactcctcagcaataaacaagaatgtctagaaataccctcaggtgtgtttctagtgtgctttaagaatataagtagctctacaagaacagcaacaaaaaagaatcccccaacaactctgcctagaaacctaaccacagcaaacatgtactaagagaacatttgtttattctatctcagagagttaaactagcctgtggtctaaaagctgtcccattgcttgagagagacacacatattgaagacctttctccctggactttcgagccactgttctggattatttcatctgtagagatgaaggtggcatgattctggtaggaagtgaaatgcacagcctgacaatttccaagccaaggagcacatacaagctcttgtagaatgttgccatttgtgtggtctttcatctaatattgggtttatcagtcaacaagacacttagtatcaacctctagtaatgacggagcttcaaagaatcctgtgttacagttgtgtagttggcagggtcagcactctattcaaatgacttgtttttactcacatctggctaaaggtattaaatcatttccataatattacaactccttttcacatagaaaataagaaacctcaaattctgactcttccatttacagcttattagactcagggaagttatttatctgtattgattatttttctcaaatgtgacttaaaaatgaaataaatctcagacaagtattataaagaaacaatcatatgaacattgcaaatctcttggtccttgaataactaagataatttttaaatcttaattattaaatgcttactctaagtaagagatattacttagaaatttacatattaccacatatgtaatgtgcaagtgcattaaaaagacacaaaactgtacttttacatttgcacaaataccattaactacagagaagaagagcatcctggtcaaagttacatggatgagtatgtcatgttaaaactgccttctactgctacttgacatttcctttctaccctaaaagtttaggaaccaattctgtctttagagtaatgatgaaagagcttaataatatgtttttccagtattcattaagttgttccaatatgaaatttcatacaaagagtcttatttcctattttgcaatttaggtaactattaagttcagactgactgcccttaaatactcataggtaccaggaaaagtccatgagttaaaatcttcgtatactgaatctttatcaatgtagagtttatggattagtcagtagtgtggattgtctatttatacacaacaacacttaactgtcaaaagtcacatattcgacttttggtcacagcaatcttcccactaatgactaaagtcacagggtctacaggttgaaattgaaatcttacttttcctctttcctctttttagcacagagctgccatctgccagcgacagcagaacttacagcttcctaattcctaacaaagatacagcaggaaacacatggtttatgctgttttctcttgaacaatatttctaaaatttgttgagatgttgaaattttcaacacacatgcaaactataaagggatcagcctggaggacatttctccatagacaaggaaagaagacttgacaatgcaccatgtgcttacaactgccagggaggcttattcagcagatcatgtaggatgggaatataaaaaatagaagcaagtttctgagctaaccatacatgccagtgttgactgtgtcaggtgctagtcaaggtggactagatgcacatctgaaatactcttgaaaaatgctctgggatttacacagtagtacagagtaagtaacaaaactctgaaaaccaagatgtgaggccatgattctggcttcctgtgtcttcacctgaagttatctaaggaaacacagaggaaaagatccctaccgtctctcccttttcccagaaatatagcaggcctgttggatgcaggttccactttttgacctgattttacatgcactactttcttatgtccactgtcttacatagttatagtagagatcaaggcttaccctacacattaagtagaataatttacaattgactgtccacagcaacataaactgatgggcacatatttctacatgtctctagtgttcacagttaattaacttcatttcaaatgttttctgtgtgttggttatttaatcccaatgaaatttttatgaggtaggtaatattcacaccatgtctgttatagaaaaggaaaatgttatcaaagaaatattagtaatttcctcaaaagccaatattcaaactcaagaaatccgcatggagcccctgatattacatactgcccttctgtgctcagcattctagttacaaactaaagaaaattattaatgagatgacacccaggtcaaaaggataatgtctccaatatcacagtctggacaaaggaatctgttcgcttctctgagactaagtcagtcctgaaggaaatgggacagagtagtagatagtaattaataatcctcatgaggtattcatccaaagtactggtgaagggaaggtgctgtgtctcagatgacgagaacacagaactcgctccaacttcatgtgatggacaatcacatcagacaatcaggctgtaaatattctcttcacaggtttaaataaagtgccaatgaccactcaaactctaatttcagtttctttgtctataagagcaacagccatgctaaaagatgcattgaaatggtgccacacagtcttatcagtcttgtcattaatattttcgatatgaatgttattactttgcattaattttaataaatatatgtacatagaaacatgtccaaacataaagaccatacaactagataaatagaaatataattagtattctaatatctcctatatacacaacttattttctaccatcataggtaaacattatataatgttgccatatgattacatattccttctaaatacaaccaacagcaaaacttttacccctttaatatacaaataaaatatgttttataaacaaaatcaatcaaaatcagggccttgggtacaatgaagtaaattaccaatccttcttgtcatgtaggtaggcacagtgcctatcaactctttgatgaacattttgatgttaccatgtcagcatgttggtcattttagttgattttacagtgttgttcccaccagagggcccaagatgtaagaaatgagaagagagatttaaaaaacattcaaaaagacataatgatatatttataaatgacagaccacagggatatcaaaatatcaatgatgcaatattaaaatctgtgtggcatccatctgattttaaagaaacttctgaatcttaatttttttccccaccatgcctgaacgaatggaaacatatgacttgagagtcataatgaacatcacacaagtatcacgattaacttttccccatattaatgttattaatttgcatttactttataaacatatacaaatcagagcaaacagagtcaaaaagcaaaatcaacacaaataattaacagcagaaagcaaagcaaaagtgctagaaattctgaggtgtgagaaccatggacatgctattcaaaggtcacaaactctgctaaacgttgaataaatttgggtgattcaataaacagaatggggctcatagttaatagtgtattttatgcttgaaatgtgttaagcaagtgtatctcaagtgttctcatagacatcaaaggaaaaatcctttaattttgtgagctgatggctgcattctaaagcatggtgatgataatcatttcattaccacttcgtttgcccatccagaatgtattctgttcttttattggcatcttagtggatctggggcatgatgctaatgaaagcactattcccacttaaataggaagtaccatggctgtatagccaaatgctgaaacgaagatcagtctatattcatcttggtcgtagacaaagagacaattagacttttctttgtcattccaaaagtatagtttctaacctcattttgaaaaaaataatgattgtggaggtttgttgcatgttccctgacagacaaaagctatccaaggacaaagtcaaagctttatgacgtttcctaaggtgacaagggagctgttggtttcagtgcaggaaggggagacaaaaatgaaacaggaggtctggatgggcatttctgaccataaaatacgaacattatgtaagattatgaacacaacagagactggataggggccctcatcaatcaggattagacaagaatgataggtgaaggttctaggatgatgttaaattagaaacaaaagcaagtaaataaagtttgagtctcatgattctgaattcactacttttagcatcacttcaaaataattgttaatattttataacatatagttgaagaggcagctgaagatctagaccagctctggggagatttctagatgaggctgaggaacagactcttatccctaccacacatctccttcatctggagagagtgttgaaactgcagcctgctcagatgggcactgaattcagacaggtacagattgtgcaaaaacaggcaattttagaaacacaatcttaaagtttctcacctctctttaaaagacccccttactatgcaaattccactgcctcttggctcatattctctggagagtacctgctgtcctctgctccctctctgctgcctttctactcttgtctaagctatgctttcaagtgttttaattcattcagatattttctagggatgttgaagttcaattattacttgattttagcccctcaatatccctctttcttaggtactcaaagctatacatgaacacaagagtaaaattattcttgattttctgtcaaatgcttttatagtacttttattcttttacagaagaataaaacctgggagaaaaactaaattttcaaatgcaattctcagaaacaaaacaaacaaaaaacctgagtgcaaacctgataatgtcagcctactttcctaagatgcatgggtccaaaggagatgggaactccactgcagaatctatgaagaggaagagccagagttaagtctgtgtatatttgaaagccattcattagtggtccacatgtcagtctgtgattatcagtcacctgctaacctggcagagctgaattggcctacaatgtgaatacagacacagcaggaagaatttatcattttagagcatccagaagtttttcagctcacagggtgtcaaaataatctccccagaatgagtgggaatgcttctgctccaaggggtgtcacactggtagtaatgcaccttaattattgctaatgctagagagcaaataaaacatctatacaaaaccttaccttttcaacaacttcaagtttgtctttgatgtaattcaagaaaagttctttcaaatttacatgcttttaaaaatatgtaactagatacctgttgtcatcatgtatatatacatgagtagtcatgaatacatgaaatctataacatgttagcaagctttaaagaaaactatatatatatatattatgtatatatgtatgcaaatgtattaaaggaaaggcacatgacaatcaaggatgcttccgaacattaagtgctatgtttattcatctcaatacaatttcatctttctatgcatttaaaattttcatataagctaggaaagtaatacaaccaaaatgaaatagggagggaggaagaaacagaagaaaagagagaggcgggatttgggcagacagagagacagaccaacttatagacaatgtaccctacatgttcactattacaggctccaaagtctctttgtttaattgaacccctaccttgacaaacttcaagttgtagtttgttgcagcacatgatgtagaaaaagagctcttaaagtcaactttataactaagaaagacaaaatgttcaataacctggaagcaatggagaagctgacaaagcacaaatgtgtctgccactccaaaagagatagaaggaagtcatgacaatgtgcttgaagtttctaccataactagacttcacctctacccagaatgactacagagtcacatgcttggcacatgcttggcctgtgcaacaggaaacacatgggagttatgctacaacatttatggtagcttggattccatagccttggcaggccagtatatttcagacctatagggtgttttttgcactctttgggaacatttgctacaaattttataacctggagccaaaacatattaacctctgctcttggatttgttcccaaacctagaacccatgtttataatttcaaattttaaatctaaagtttatacctctggacttttaattttaaatctaaccagtgggtgtatctaggttcccatttcctctctgtttaaaatgtttgattatattttagaagaacaacaataattcatttagggaaataacttgaaatccatgcaaaaatgattcaatattgacttagatgagcttgagattcagaacacctatatttggttcttttattccattttcaatgaggttttcaataatttatatgcattaaattacttttaaatcctatttgtttatctctgattttatcaagagctgtagtgttgtgattattcctagagccttctgggttactctgtttcccaagagtttgtaaagtcaggtccttgtaaaatatctcacagcctgctgctgtttaaactgattttaatattactccaaattaaatccattacttctactctatcaattttccagcttgaatcagtaccctcaagattcccatctactgtctattatgaagccattggttaagtctgtctccttgttccatatcctgtcaccttacaggccttgaaaattctatcatagaatctccacatgctttactccttgccagagatgtctaattcttctgtgcatattacagtgtcaggcatgttctacacnnnnnnnnnnnnnnnnnnnnnnatggtctaatatcaagtgactttcattgtactagtacaagttcattcctctttgtcaaagtctgcatcttagttttctcctctcatctataagaaaaatgaaataaatacagttggactcagtataaagttattattacatgaatagaaacaatcttctagctcttaaacgtttagaaacttggtcaaagggaggcctaaactttaagcttggagaaatgtatgtggcaggcccaagcttcaggcttagagcagcatcagaaggaggcctccacctcagacccaagagcaaggagagactactgggggagatcacagtgacagttttcagcagcagttttcagaaactatcactagaagttcctctgggaaaaagcacctgtgtcccagccagaaccactgtcatttctctgttggagatacccagctgctacatctaccactggacgctcagcccaatctacacctccacggaggtgtgcccactggagctacagtcccacctgtacctcaaggagtgaccgcctgaactttgggcccatttccgccaggaggagcgttcactagaggctctactgtgcttgtgcctgaaggagtggtcaatggagccacagcccccaactataccaactggagaaagagatagccccatgaaccacaagctccacctataatgactagaggaagagatgtgtagacaacaagataagaatgcactcaataatataaagagcaatacagcaccagtagaaactagtggtgctacaatagcaagaactgaatatcctaacacagatgaagtagaagataacaacctaaaaaactttatgagaatgattgagtcccttaaagagcaaaaaaaaaattcctttaaagaaatggatgaaaagacaaaaatttagaaacattaaatcaacagaatagaaaacaaattttatttataagccatttagaattaagcactttaattaaacattttatgccaaattgctgacatacattctgcattttatgtgctgttagatacataagcatgcaaatataaaattagatttactaataatttatgtcctttagtacactaaatgctatattctactttatttttaaattttaataaagttaattttattacttctttgagaacttatggatccattcaaagcattttgattagattatattccttccaataacaccttacaagtccatccaatttctcccccttccccagcccatttatcttcatgtcctttgttttgttataacaatatggatttctatttgtgtagccaacacgcttaaaggtgtggggccatccagtggaacatgtcaaaccagtcacagagcacacccataaaagaaaatgaatctccttcaatcaaaagccataagccactccctcctatacctgtgctagaacattgcctggcttgatcctgtgctgatatattgcagagaactacatactgtaaattcctgagtataatgctcctgccacatcaaggaaactgtttaattctggtgtcctcacacctttggtttttactatcttctaccccttttccatgatgctccctgagccctggagggtggtgagataaagatgtgcagttgatgactgagccttggggagaggttgggacaaagatgccccatttgtgactgagcactccttattgattttctggttttaattttctatactttgtgaatttctgggttaactgtcatgcaccacacgtggaaaattctctgatgacatctgagatttgcactaatctgtaagtataaaaaactgaatttagatggcagtttgatgctgtatttatttagcaaaatcaaaagtactctcattcccagggcctatgagcttcccagtcatgggttcctggtcagatctacagtaccaaccatgtatttcctactgtgcagtgaaccttaagtcttatcagagagcaaatgattacacacataacattcatggcactattacactcacatgcatatcttgccacaacaatcattattgtgcctcacagagttcagaaatggatgagaatgttgacaatttttcttcctaagcagcctaccaatcacttgttggtactgtgaaaactagccagttgagatgatgtttcctagtcagtaccaaattgagttgtccatgtgttttgatcaaagtgtctggtgtcttcaacaatagtgtcttaacatcaaattctggtggttaactaaaagtaatatcaactaacaggctgtattgtttaggggctctatgggacactgctggtaaacactcagaaccgggatttctcttctggaaatctatggctctggggagaagtatgtcccctgtggggagtaattccaactgaactcttttacctgaaaatatagctatgtctatacattatgtgggtgtatttaataagcctataaattagtattcattcaaatactaagatgattttacaaatggataacttctacctatgatgtcatattgcagaccaaacatagatatattgaaattagcatgtaaaataaacttcaggctatcctaatccaaatatatggtaccatgtagccaaatactactaaaaagcctacacactttagacagttcaagtaaggaatgctcagcttctatctctccatagactgttcatatcttccctcaatgaatccatttaaacatttataaattaatactacaactttcacacagtgttgcatagtttattcagagttaagctatgtactctcattagctaaatgttcttctgtagaactttgaacttcacattctaatttctgaaacatttttgaagactaagcatacatattgtctttagccctgtgtcctcacactgtagcacaggcactaatatgagtcaagaatggtttataggatcactgtttatatcaatctacttacagattaatttaactttaaagcaagtctatcctagaccttcaaggagaaaatagtgaaattaggtctcatgagctcaggtggactctaagattcttaggtggaatattagggggtcaactccatctgttcaggacataattttgtgggaaatcatgttatctcaaatattatcaggcaaaatcaaagactcaaagcaatatcagtcctatgacgcctacaaagaaatggtgcaatatggcgctgatgagcatctttgaaaaataaaaagtctaatgacgtcagaaaaacccacaagccaccatttttaaaataccagcaagttgcttaatttgtatatgtacatgctataggaacattaaaaagataaagaaaataataacatcataaatagaaaaactacaaccaactgctttccttccttctaacattggctaccacaatttttgtgcctcttttgttgttattatatacatattgcttaaaagttttacaaagaaaacctatacacaaaactatatgtttatatatgcatatattatgcatgtattatgcatttatatgctagtagagcccttttccaatttttagattatagatacttttgcaatgtctttataaagaattttttgtttaattttttctttttctttaaactaggaacaagcttcttttacctgtcaatctcagttccctctccctcccctcctcccctgcatccaaccaaccccctattccaacccctttctgcttgccagggagggtgaggccttccatggggatcttcaagtctgtcatatcatttggagcagggcttagactctctcttgtgtttctaggctgagagagtatctctctatgtggagtgggctcccaaagttcatttgtgtactaagagtaaatattcatccactaccagtggccccatagattgaccagacccccaaactaacttcctcattcagggggtttggaacagtcctatgctggtttcccagctgccagtgtggcaaagatctagtcatgggaaaaatagaggtgagcaagaagagagatgccttaatagagggagccattataggtttaaagagaatcctggcactagggaaatgtccagagatctataaggtggaccccaactaataatccaagcaatagtcaagaggctactttaaatgcccttctccgataatgagattgatgactaccttatatgccatcctagtgccttcatccagtatcagatggaagcagatgtagacactcacagctaaatactgagctgatctctggaatccagttgtagatgagcaaagtagttaaagatcaggctgcaggaaacccacagaaacagctgacctgaacaaggggttgctcatggacccgtgactttacaaattattttaaagatgtctagaaatgaaatctgtattccatgtgtgtcttacaaataaatataatctcaagaatgatttattcatgggattgtaagttgcttcagtgggtaaagatgttactgccattcctcatgataggagttcaatcccttgtgccacatggtggaagaaggagaaaacttattcctacaagttttcatcagacctccaaatgtgtgctgtgacatgtgcatgctacacacacacacacacacacacacacacacacacacacacaaacacacacaaaaaaaccttatttttcaaaagaatagcttgctattaaataaattaaaagactctatgtatgaatcttgtaaataagtcaaacacctaaaaacacaattcaactctgagtggcatggaataaattgggtcttggcatgctaagcaagcatgggccacaacaggtcacaattaatgaaatgaattttgtatagagttcaaagtaggaattgtcatagctacctagatttggaaaggtggagaagggtttttagagaagctcttttataagctgtgttttgagacatgaaaagcaatatttgcagaccaaagcatatttgagtggtagccatctagagagggaaaagtcaccaaaatgtgagccataaaacataaacagacatcagtgagtcttcactgatgaggaaaagcatgcaaatataaatagaagagaggaggtaaaaaagaaagagatgggagatggagaattaaagtaaaaatcagatataaattcactttagagttagcatgaccagataaactgataaaaataagaactaggagatttcaggacacacaacaaaatttatacacacacacacacacacacacacacacacatatgcatgcatacatatatatcacacatacatacacaaacatacccacgcatatacatacttatatacccacataaatataaatacacacatacacaagcaacatacatgtacacatatacatacacacatgcatacacacatctacatacatacaaatttacacaactacatacaaatgcaaaatacatctacatacatacaaacacaaagatacacatacacacatacacacacaaaagtcacaaatacatacatgtatagctcatatatatgtataaaatataaacctttagtaatcaaaacagcatggtcctggaataaggcaaatgaatttaaatcattgctttggaaacctcagtgtgaatttatttttcctgcctatgtaaggttaattgacactgaccactttgccttagtgagtgaaagtgagtcagggatgcatgcaggtctctccatctttttacatgactttcaatggagatgaagttaatgattttcagactctttaactaatgagttgatgtttccattttgtgcatactcttgtaaactcctcagaaaacttctaacagtttgagaaattaatggacttcaaattgctactcacctaggtataaacattaataagcaaccaggtagccatggagatggcttacatttgattaataaaattatatttcaaaaaaaaaacaaactaggtaaacatgctaataacattacctgttagatgaagctagtaattgtctcctcaatgaccctcttcccagttcatcttcacaatttcctttcttagagaaaacatgcccttaccaacttttaggcttagtgtaagtaacacttataaagttaaacacacagactcctattcaccctccttctgtgactctaaaattgtcagacagtgaggttgaatgaatccctttgtctgagttcttgcttttcataccatggaactttaagggcttgtggtagataggccactttccaagcactgttcagcagataacaagtgagaatagaattatatttcttttctttcattccagagattcatttattgcttaataatttaatatttcttttcattccttgtcaagtttgactttttaatgatgtattattttctgtcaacccaaattgtatgaaattattcaaattgtagggaataagagtaaatattcatccacaatgtcctagaaacttgaaaatgcagacaagatgagtcactactctcatccactcagagatgttaattggacactttctatgcttcagactctctggtgggtctcaaattagcacatgaaatggaaggtcccccacagaggaattgactgaggaaagagggatcactgggtacctggcagagcaagggtgttcccaatagaaggtacactgatgtagtttgaagattgagctgcctcagttgattgaaaggaaggctagataggagggagggaggaagaatatattgttttagaactgtaaaaaagcatcatgagctacagatctcagataggatattcatctccttaaaaaatttggagacagggagatatgaacacatagctatctgggcaagcaaaaccagagtctagagtataactaatatattgacatgtttctatggcttgggaggttagcctgaggctgtgagacccaggctaatgacttgtaccacctgacagatactccagtatcaaattaaatagacagtcttaggttcagcatcatattcttatctatggcaaaatttttcagtaatttatgtatggcatttaaaacctttatgggcacacttacaatatataaatgccgctctaaaattatgaccatgattacttttctaaccttgtctctgagctgtttcaaaagccatgatatgtaactctcagagagaaattcaatggcatctctaaattccaagaaggaaaaacgggagagacttcagaaagttttttcagtccagctgatgaatgggaaggaacctctgaatgtgtagggcatgagagccttcaagacacacctcctcatggtatggagtgtgctagtgaaaaggatgttctcaaaaacaaaacaaacaaaaaactggcatgaagttcctttattcactcagattacatttaaattaaaatcattcgtatagacttatgttggtatatttaaataagaaataaaatggcatgtaagaatactatctactgtatgcaaaattctatataaatgtggtgtaatactattaaatatttcagtaagatttgtttataaattcagttaacatggcagtaacatgaataagctacccaccttaaaaacattcattccacgggagaaagaaaactcacaaatacctaatattgcatcacttttaaataatgctggagctgagcttggcttcctttagagccacctgctttatagttctcaacagtctcacagacagcattgtcttgatatttttaaatcaaaggaaatgatataaatgtattaaaaacaaatacagaaatgggcacagatcacaagagtttagcaaaatgaattcacaaaataaaaaacaaatcatttattttaaatgtcgagtcagagaaatgtaagaatactatggcaaaagcaagaagacagagccactttttcaattctaacactgctgattacatttgacatatgcacaagagctcctactgttacgataaaatttccgccaaaagcctcctgagccccaccgccatgtgtgagctttatgccagccacctgcctgagttagggcccaaatattaggcccaaatgaatacgcagaaacctgtattgggttcaaagctgcttggccaatgactaggacttctcttctgttagctcagtcttaattatcataaatttatataagacttatcggatgccttattggtgtccctctttgccagtggctcacatcctgccactggaggagacaaacggggaaaaaagggacccttcctgtttctccttcgtttaaatatgagtctccttactatgtcatttcctgtctggatcatcacttctctactacatttcccaaaatcctctttgacttctagtcccgtctaacttgctgtctcattggccaaacagtattttatttaacaatcaataagataaacatacacagaagtacttctcccatcactcctacatacataattttcctcctgtttcttccttttgctgtggtaaattatgcttagcttagtttcattacatgagtatttaataatctatatttgttttgttctatcctaaatcactgatttggttttcatatcaatagatagtgaattaaagtttctgctccactggatccttgcaaatattgtgaatgttagtttatatctgcttaacccgatacaggcatatagtggaaccactttagtttaaattttcatttacttgatgactacaaatgctgagtgaacctaatccacattggtcccatcacagcagtgtctctgtttggagagcatgttagatgtgaagaatctgaggtctcatcctagacttgccaaacaacagattcaattttaaactataccctgctgtggttcaagtgcatgcctcacaagtttgaagtcttgagttggattctagcatgccatgcagataaaaagccaggtgtggtgacacatgcttgtattcccaatggtgtggaggcagagacagtggatccctgggacccctgatcaattatcttactctctggcagcctaggtaccagtgagataccctgtctcaaaaaacaaaggagatggatcctgaagaacaacacacttggttgagctcagatctctacactcacacacacacacacacacacacacacacacacacacactcaaaatactcagaagtaactattaatttatataaataccaatatatgaaacaatgatatacagtatctttttatgtactaactggtaatttgtattcagtatttttttgccagagacatctacacaagatagaagttcatgtgttttctttaaccaaatatttaagttatgaggaaaacaaatttaccttagtttgtagacagagagacatgtctgtagtatctgagcaggcaaacccagaggccgggtgttcagttagtcattgaaatattgttggtgagatttgtggggttggcctgaggctgtgagacctgagataataacttgtgccaccttccagacatttcagcaccaaactgaatagacattcttatgtacagcatcatattcttatctgtggcagaattttcaataatttatgtatgacatttgctgtaggaattttgtccatgccatgcttaagaataagaaaatcactctagtagcaggttcttagccttgataatggtgccaagtataagtttcactaactggaataggacttaaatctaatcagaaaatggttggtgactcccataacatttgtgacactatggcaactgtggctcattttataaaatatttacacaaacatagacagacacacatgtacactatgtacacacatacaccacacacatatatatagagaaatacatacagatacacacatacatacatagacacacacacacacacacacacacacacacacacacacacacacacacacctgtattcccaacacctcacattataaaatattctaaaataaaatactgatacggattttccattaactacttcgaaactcctattctctcaaattttggattgatctaattctgaaggattcttctggtcactcataacttcttcatgacatttccttcaagcagtgtctcttaatttttcgaaatgaaatttgacatatgaatatcattccatcctatccataaatgagcatataacttgtcttttcactagataattcttttaggttagtagaacagtgtcacattgtcctaactttatcccagtatacctgttttttgcagaaatatcccaattcaacttccatcttttgtgatttatttaaatgatttattttacatcctgacaacagtctcccatacatcctctcctctcacttcccttcccacctcccttccccatccatcccttcttcttaattactcagaaaggagcaggccttcaaagggtatcaacaaacatggcatatcaagctgccataagaccaagcaccaccctctgaattaatgctgggcaaggcaatccaattgaaggaacaggttcacaagagccagccaaagcaccagggacagttcctgctcccagctccaggagtcccacaaatagaccaagccacacaacacaactgtcacatataagcagagggcctgggtggatcccatgcaggttcccagttgttggttcagactccatgagttctcatgagccaggctagctatttctgtggttttttttcccaatgtccctgctcccagattccaacaatccctctaccatctcctcagcatgactccttgaacagaacccaaagtttggccatgagtctctgaacctgtctccatcaatcaccagatgaaagctaactgatgacaactggggtagtcaccaatccaatgataggggatggacagttctggctatgcatccacttctgctagaagtcttacagagggccattcttacagactcctggaggtttctcttgcatcaggattctacctgattgtgtaaatcccactgttctagtctcagtacactttcagtactctccccttccacccagtccccagcccaatccctcaatttcttatgcccacctgcctccggttcacccaggagatctcctctatctcctctttctatggagacccatgtttcccctatagagcactccttgttacctagtctttctgggtctgtggattgtactatggttatcctttactttgcagttattaaccacatacaagtgaatatatatcacgcttgtctttctgggtctgggctacctcacttgggtgattttttaatctaattctatacctttgccttcaaatttgctggtgccattgtttttaacagttgagtaatactccattgtgtagttataccacattctctttatccattcttcagttaaggggcatctaggttgtttactggctctggatattatgaataaagcgtcaatgaacatagttgagtgactttctttgtggtatgattgagtttcctttggtatatgtcccagagtgatattgctgggtcttgatgtaggatgattcccaattttcggaaaaattgatttctaaactggctgtacaatttgcactactggcagtgatggaggagtattcctcttactctacatcctctccagcataagctttcattggtgtttttgatcttaggcattcccacgggtgtaatgtggaatttcaatgttgttttgatttccatctccctaatgtctaacaatgatgaacatttctttaagtgttttttaacatttgagatttttttctgttaagaattctctatttaggtcagaaccctatcttttaattggattatttgttatttgatatctagtttcttagattctttatgtattttagatatcatccttctttcagatgtggagttggtgaagaacttttcccattcagtgggctgctgagaagatggagcacagtaaataatcaaactgagagctgaaaacaataaaatgggaacaaagagaacaatacagagaatcaatgaaacaaagagttggttctttgagaaaatcaacaagctagacaaaccattaagcagactaactaaaaggcagagcgagaatattcaagttaacaacatcagaatagaaaatgggaacataacagtagacattgaggaaacccggacattcgttaggtcatacttcaaaacccatactcctcaagattgaaaaatataaaagaaaaggacaaatttcttgatagatacaatatgacaaaattaaactaagaacagatacataatttaaacagacctataaccccttgggaaatagtcactaaaagtctctcaatcaagaaaagcccagatgattaccacacagaactctactagatcttcaaagaagagctaataccactaattattccaaaattaatactcctcaaattattccataaaacagaaaaagaaggaaaattgctaaattatttttatgaggttaacagctgccctgaagcccaaatcacacaaagaatgagattacagaccaatttccctcaagaacattgatgtaaaaatacaaaataaattttttagttgttagccttgcttttaatggctgagccatctctccagcccaactgagaaacaacctagatgcccctcaactgaagaattgataaacaaaatgtggtacatttacacaatggagtactactcagtgggaaaaaaacaatggaatcttgaatttctcaggaaaatggatgaaacaagtagaaaccatcctgagtgaggtaacccagtcacaaaaagacaaacatggtatttactcactcatatatggattttttacatagagcaaagaattaccagtctataatccttacttccagagaagctaggaaacaaagaggaccctaagagggacatataggttcccctggataacaggaaagggacaagatcaccagagcaaattgggagcatcggggaagggagaaggagttaggagatatcaaaggggagaaaaggaggggggaggacacgaggaagtaggaagattatgcatgtcaccggtataccacacaatcctacgggacaaacagtggttgagagatctaaaaagaacactaaaggagatgctcaacaaacaagcttggaagtctaaaccccccaattataggttgcataatgctttataaactttcttaatgccaatgaaaaaggacaaacagctgcagaaagacactggactacggggaaaaaactgctgaactcaatcagccagcattcttcacagatgtactaacctctgtatggaaaccaagacatgtgttatgatggggtaggggttttgcattggtttccacaggaaaagaaaaactttggattccatcaaagttggtcaagattcgagttgaaaaggaaaaacccctcgacaaggagaaatgacaggtattctactaaggtatatctcataaactaaatagacatctcccaaaggaaagggaagtggttttctcttatcttcaggaaaactcatttacagaaggcaaaggacactgcatgggtagatacttaagatgagaaggtagctataactgccaaaaaaaaaaaaaaaggaacatgccatacaataaactttacagctgtctctcagagaactctatttctctttttctagtccctattcaattaaatcaatgctggatttagaggtggatttggctttcctcctctaaaatccaagcatgttatttaactaaactttagagtttctgtattgtatcaagaagccaattgatgtaatacagaataaaagaagaatttggggactatctgtctttcttggctctttctttcaaggtgtacaccctctcataattgttatgttcccaaggttgccttccccaacacgtgtacatacacaagtaaacatttctctgctaactgtttatgtttgagtcccacacagccaatgaagacctgcctgacagcgatccctggacactctggaaagaaaatgggccacacatccttgactgcactggatccaacttgctccatttcaactgacactccggccaaagcttcaggtactgatttcaatcaagttgaggatttcaggcgagatcttcaatcaagcaaatctcatctaacatggactagatacaatccattcaagacttttactatactaacattttttcctaccccacaaggctgtcnnnnnnnnnnnnnnnnnnnnnnnnnnnnnnnnnnnnnnnnnnnnnnnnnnnnnnnnnnnnnnnnnnnnnnnnnnnnagaatagtgtatatacctagttagggatagcttcctattgtttattgttgggattggaaggaggtgttcaggcttgaacacctctttcagatgactttaggatttagttaaaatagatagctatgatgtgacataagcaaattgttgtatcttcttatatttcacctttatgattgttaattttggatactttacactgttaagtcttaatccacttttagactaaaaggggaattgtaggggaagcagtagccatgcctaatagggctgactacaggtgcatctgtgtctgaccactcctgcaagggcgtggtcagggtgatgtagagtgagagtttcaggtggctgggtttcgctttcagtttcactttcagttttctttccggcttgctgtacagactgctgtcatgccggctggctaggctgctctgtaagtaaggattttccctattaaatacccctatatttctatctggctccatagtggtaattttccactttaggagaatagaggagagcaagaaaagagatacttaatagagggagccattataggtttaaagagaatctggacactagggaaatgtccagaaatctacaaggatgactccaactaggaatctaagcaatagtggagaggctaccttaaatacctttcccctataatgagattgataactactttatatgctagcctagagccttcatctagtagctgatagaagtggaagtagagattcaaagctgagcactgagctgaattactagaatccagtgcagagtaaaacgtgatgagcaaaggggtcaagaccaggctgaagaaacccacagaaatagctgacctgaacaaggggaactcatggtctccagactcacagctagggaaccagcatatgaccaggcccctctgaatgtgagtgtcagttaggaggcctgcacagtctatggggcctttggtagtgaaacagtatttatccctagtgtacaaatggatttgagtgcccattccccgtagaggattctctcttagcctagaaacatgggggagggcttaggccctgtgcaaaatattgtgaaagactttgatgatcccccccccaatggaaggcctcaccctccctggggagcagaagggggattagatggtggttgggagggatgggagagagggagggagagggaactgagattgatatgtaaaataagattgtttctaatttaaattacaaataatctaaaaaatactcaatgaaatactgacaagctgaatccaataacacattaaagaaatgatccactatgatctagtaggcttccacagatgcaggaatggttcaatatatgaaaatctgctgatataagcaaactgcactatataagcaaactgcaaatatgcactatataagcaaactgaaagaaaagaatagcacatcaccatcttatttgatgcttaaaaagaaacttttgacacaatccaacaccccttcatgataaaagtcttggagagatcaggggtacaaggaatatacctaaatataataaaagaaatacagaaaaagccaacagccaacatcaagttgaaaggattcaaagcaattccactaaaatcaggaacaagtatgtctactctctacatatctattcagtatagcatttgaacttttagctagagcaattggacaactaaaagagatcaaggggatacatactagaaagaaagaagtcaaagtattgatatttgcagatgatatgacagtatacataattaactctaaaaattctttcagggaactcccacaactgataaacacttttagcgaagtaactggatacaagattaaatttttaaaaagtagctgtcttatacccaaatggaaaaaaaatcacagaaacaatcctcttcaaattagccataaactatcttataaaattctttatagagattcaaagaacaatactcaacttcatatggaaaaacataaaacccaggatatcagtcctgtacaataaaggaactgccagaagtatcaccatcccttatctcaagatatattacagaattatagtaatgtgggattggccataaaaacagattccttgatcaatggaatcaaatgaaagaactgaacataaatccagacaactatggacacttaatttttgacaaagaagtcaaaactatacatgaaaaaaagaaagcatcttcaagaaatgtgccgttataactggttgttggcatatagaagaattcaaatagatctatatcaccctgcacaaaattcaagttgaagtggatcaaagactttaatataaatacagatacactgaacctgatagaagagaaattgaagaatagccttgaactcattagcacaggagacagtgtcctgaacagaacaccaataacaaagacactaagactgacaatcaataaatgggactattgctggaggttccctttgtcccaccagtttccaccactgcttcagcacaaataaacacagagatgctatattaattgttaaactgatggctgatggctagggcttctgattgctagctctgacttaattattaaaccatttctataaatctatgtatttgtatgtggtcttgtcttactggagaatgcccagacctgttacttctgtgtagtctacatgacaactcttctggtgggctccctctgcctatctttctcagaattctcattgtctcttagtccaacctatcttcctgcctctttggccaaaccgtgttttatttatcaaccaataagaaaaacatatatacagaaggatatccccccatccaaggacctcatgaaactgaaaaaaattcagtaaggcaaaggcccattgcaacctctcaaaaactattattagaaataaaattacatcatgaaatttgcaggcaaatggacagagataaaaaaaatcaccctgagtcaggtaacccagacctagaaagataaacacgctatgtactcactcataaatggatattagatgtaaagcaatggataaccaggctgcaatccataggcccagagaatctaggtaacaaggaggaccctaagaaggacacatggatctccctagtaaggacaaatacataagacctcctgggtaagctgtgggtggggagtgggtagatcagaggcaatggggaatgagaacatgagaatgggatagttgagttggtggagggatagagagagagaacaatgaaagttatatcttgatagtggggtccattatgggtttgaagaggaacctgatgccagaaaaattcccaggaatccacaaggatgaccccagctgatactcttagcaatagtggagagggtgactaccctaattgtcattatggaaccttcacccagtaactggtggaagcagatgcagggatccacagcaaaggactagactgagctccaggagtttagttaaagattgagcaaggggatataagatcatgacagaggaaccgacagagacaacagacctaagctagtgggagttcacacactctggaccaatagctgaggatcctgcatagaaccaacctaggcccactgaatgtgggcgacagttgtgtggtttggtctgtttgtgaggctactgacagtgggaccagggtttacctttggtacttgcgctggctttttggagtccattccccatggtgggatgccttgctcagctttgatggcagaagggaagggcttgctcttgcctcgacttcatatgtctggctttgttgattcctgatgggaagccttaccctttctgagtagtggatagggggtggacagggaaagtgggtggtgtgggagaaggggagtgatgggaaactgtggtaagtatgtaaaatgaataatttaaaatgaaaaagaaatacaaaataggttctgccatagaatttgtttttcctttaaaattgctgatattcttttttctgatactgtctttcacagcaactgatcaaactcaagacagcctcctacagggacagtgttgcaatattttgttaggcataaatgactgtctagactgtttacttgcataatattttcacagtgctacaccataattataaaacaacatgaattacatcaaaagtttaggtttacagtttattattaatgtttatataatttgtgtgctagacagggtttccagcatgaaggatcatgagcatactaactttagtatctgaaatggaactctgtacaacctagccctttctgttgttctctctgagaacacatattttgtattgagggctgcagcatcatctctgtttcacaatgaataaataatcaattaatacaacatatcttttcattcatttgcaagtgaattttgttgacagtggatggtaagttggaggttctctcaattgacaaagaacccaagagtggtttaagtgtatctctatacaatgtctctattagttgttagatgaaaaataggaaattgtacagtgaacaaaccagatatcagaattacagccaatgaacgcatgtgttacagccaatataattttctaagaaacaagcaacactttcccggtgttatgccagtcaaaaaatatatattgcaaatctaataatgtagaagaaacatcacagaattgtgaaacatcagtaattaaaaataaaacgcaattatagtttttaaaatgtcaatgtcataaaaagagccaacaccatggtaataatgttccagaatttgaagagtctacaaattaaaaactatgtgctgaagagatagctcagtagttaagaatatctgcagctcttgaagagaaactaaatttgttctcagcaccaagttccagtgggtcacaagtgcctgtaactccagctcttatagatcacatgcccccttccagcttccccaaacacagactatgtcccgaaaacagacccacccacagacatatgtaaagataaaaccaatcataaaaatataaaacataatttggtaaaatacctctaaaatgtactgtgacaaaaaaatgctgaaggtattcattcaaggaaacactgaaacacagctcataggttggataaaagtcatttgaatactattaatttcttaaagttaatatctgtgctgtgcttatataaaaatgatgcaacattcttagaaaatgcaaagaaatatgttgtaataaggaaaccttctttaactagtcaaatgaagccaaagctagtaagggttaggcctgcatgcagggttgttctcagcatgagcctccttacagtccctgtaagactgaaatgccttcaagttacatttgattacaacagaagcataatgacgctaaaacccaaagtatgttcattaagtatcgggtatataacacagtaactacttaaataatattattttaattacttatcataacagctctcttagggccttgtattgccttatttctacaaagaaggcatttctccttatgcagtattgagtggaaagtaattggcaaatattaaaacttaaatagaacagaatatttacatataactaattaacattttgttctcttaaattatatcattcaagattttagaccatttgtttcagggagacacagaggaacacaaatacacacacacacacacacacacaggcatatacatggcacacatatacacacctatgaaatttttctatgtcatttaaaaataatttcctaaaatctacagttcagaataaaaagaccctgacataccaatatctgtgactctctggtctttctattgtattttccttctaggacctcatattgaattgcttatttcactcccctgtgagcaaaagatactccttttctaaggttccaatctccagtatttttacaattgcttgtgaacaaaccatcacaaagagttgcccaaacacacaaagcttactcgtaggaaaaagttccagtcattgatgggcccaagagtctccttatggagctgattcaagaccatgtgactaagcactaccaatgtctctctgctttgtaatgccatggcttttgtgcaaaacaatgcttgtatgaaaataaaatgtttcagaagaaaagagagttttaaagtggttttccttgagatttaaggaaatggttattcagaaatgtgtaagaaacaagaaaaatacatcctcagaataccactctatgaacaaataataaagccaaaatcacttacagtaattttcattgaatattctagttgcatgcagccagaaattgccttgaagaaatcactatatggataaatttgaatgggtcacaagtttctggtagcaggcacatgcacaacaaatagtttccacactaccatactacagtaattaaatcaaattgatgtctttaaattttaccgtactgatatatttttggcaaaataataataatattttttacatcactatagtttttataagtttgtcataaaataacaataagctttaaaaacttcattgtgtacatgatattaggaatgagaaactgagtatagtcttgggaatgaggaccctgggaaagggatggtcaatatgttgtattcctgtgccttgtcacgtgttattttctgcttcattttcatgtttcaacacaaaccaagccacctgctcttctccaggacacatagattactggggagtatgcagttctggctgtttattcttttgggttgaaatttgttttgtttgtttggtgcttatatcaatacttttgtgcttttgttttaatgtaatctttgtattcctgggtgtgtgaatttttaattatgaattttcacaagcttctataggtattttatttccattagattattctagaaaactccttttgccagttttattttccattatccagttgttctacacagtcttattctttgccttcttgctttgcagggaacctgggatattgtaatagttgcagaaatgaagtaacatccatggatatgcataaaggtaaatgcagatggtctctgtttgccaccctgaatctgaacataataagtctaaacaaacagtagttggttccagaggtccttgcatacaagctgtctctttgtatcaaatatctgtaaaaggacacaaccctggactcactgctaactttctctagtaatcttttaaagtctctcatatatttcctaagctgacatgcagactcttcataaaattctatagtcctttctctttttgcttctgcaggctcagtgtcagattccaaacacaggtgctcaattcttcacataaggaccttttagtcacacagttcttgctgtatctcccactggactacttacagcacaaccaaaacatgtgttatagacattcagacttcataaaccctcttcaaaggtctacttcattgagaataatactttgttattagtagatgttttctatttccatgaataggagcatgtatgtacttttcttgttgagtacaggtttggtcattcacattttattttacccaatgaattatgtgttgcttgtgtcatttctaggtaacaatgttaagagccaccaaagggaggaattcacagggcacatttatccttcttgcaataccctagacaatgtttctaagcatgagtgtacggacaccttgctgtgcattatccataaagatttggagacccagggatttacagtgtaataaagcatcactagatcaacatattcaactgtctttctgctcttttgatgctagtattagtgtttgcaagtgactgggagagtaaacaccaaagaaatacagataaagggggttttatagatggtgaaatggaaaagaacaacggcagctgaaagagccaactggagtttggttcctagctcccaagattggcatttcaaaacttgcaataactccagactcagagaaatccactgccctcttctggcctctctctgagcagctgtatgcacatgtatatacacactgatgcagatgcagacacacacaagtaaaaactttgaaatgatattttaaaagaaataaatttgtaggcaagtacataattacctctaatggagaaaaatggacagttgtccttgttgtaggaatgtgcttcttttgggtatatgcctaagagtggaattgctggatcttgtggtagactgattcccatgttcctgaagaaacaccatacagatttccaaagtggctgtatgagttggcactcccaccagcagtggaggagtgttcccctttctccacatcctctccagcataaattttccttggtgtttttgattttagccattatgacaggagtaagatggtatctcagagttgttttaatttgcatttccctaatggctaaggatgttggacactttcttatgtgtctttcagccattttagattcctctattgagaattctctatttagttctgtatcccactttttaattggattatttggtgttttggagactagcttcatgagttctttgtaaattctggagattagccctctgtcagagttcataacagcattacttataatagtcagaacctggaaacagcctagatgcccctcaactgaagaatggatagagaaaatgcagtacatttacacaatggagtactactcagcagggaaaaataagcaatggaatcttgaaattcgcaggcaagtggatggaactagaagaaaccattctgagagaggtaacccagtcacaaaaagacaggcattgtatgttctcacttatatgtggattttggacataaagtaaaggattgccagcctgtagcccaggtggcaagagaggctggtaaacaaagagggccctaagagagacatacatggtctccaggagaaggcgaataggacaagatctattcttgagcaaattgggagcatggggagggagggagagggaattaggagaatgagaatgggagaagaagaggggtgaggaagacatgatggtacatggagtttgagttggggaaagaacagaagagagcaagataagagataatataatagagggagacattataagttcaaagagaaatcagacactaggcaaatgtctggagagctacaaagatgataccaactaacaatgtaagcaacagaggagaggctaccttaaatgtcctctcctgataataaggttgatggctaattcatatgccatcatacagccttcatccagcagctggtggaagtagaaacagacaccacagttaaactataaactgaactgaaatccagatgcagagaaggaggagtgttaagcaaaggggtccatactaggctagtgaaacccatagaaacagctgacctgatcaaggaaaacctcttggcccccagattgatagctggtaaaccaggatgggactgatccagaccccctgaacctgggtgtcagtgaggagaccttggaaatctatggggactcttatagtggatcagtacttatcactaccataggaatggactttaggagccatcccacatggagggatactccctaagtatagacacaagggggttggcctaggcactttcccaaagaatatggcagattttgaagacccctatggaaggcctcaccctccctggggagcagaatgggtataggataggtagggtgttatttggggggaagggaagggtgggagggagagggacctgggattgacatataaaataatttcctttctaataaaaaaagaaaaaaaagaaaaagccaataaataaataaataaataagaaaattgggaaatattaaggaatcaattaaacaacataagttgttgctgcattggtaatagaaatccataatataataaaggagtctgtagcttttgtggaggaaattaggaagatattatcagggaggtcaaacttatatcaattaaataagataatctgctagaagacacttagcaatccctcacatgttgtaatataggaaatcaacaatgacaagcatgacagatgcacacagttgctgttgtctttagacagactattgtttttggattaggttcttagacatgaaaactccaggagaacacagttgaaccataaataaataagacacacagcaagcaggttcatgtagctgaagctgccaaggtagatcaaatgggggattcattttctattactgctataacaacacatcgcatgcctcacaacttaaaatgatacagacctatatgatcttacagttatggaggtcagagatccaacagaaatttcagcacactaaattcaaggggtttggagagtggcagtctcttcaggacacttggggaaagtctcagttcttttacttttcaagtattagaagtggaaatctgtgtttcctttaattcttgatatttaaagcaagcaaagttggttggatccgttccattctatttatggactctaacctccaaaacatcttttccttcctcttattgcatggggcctacttagtaatacaggtaaatctactattgtaagacatgctgatcgacaactatcaatacatgcgtaatcttgatttctctttactgtgcaagtgagaatgctaaagaacccctgaataatgttgtagttttagaaaggacttgttgtgattaccacaggagacaacctgccttccagtcataataagactgaggaatcatcagcttccaggagacaagaggaaatcagatgtttcaaaaaccgacagcaatgccctcacccctatttgtcaaggtggctctttaatcccagataaagcacagcacagatctacatcatttgctttacagatatgaacactcatgtgaatttctacacgtggctcttgcacaacctttatttatggcatagtgactgaatactcaacttttgttatttgtggatctttgcctttgaaagcatctgcatggctttcatctctccagagtgctaagggctttatgcaaaaaaaaaattataagggttactggtactttcagagtgttgcagccaactggaaattaaaagcttccctctcaacctctacttcaccttctgaagcaacctgaagacatataatatggggtctgacatcagggaatgacagcaggtagaaagctctgcaaaactattaaatgctatcattgtagtctatttctgaaaatattgacaacaaagaaatattattaactatcactagctgcaattcccagaaagaaggcaatgaccaggaagggatcggtgtgtaaatgaatgcatatttacatcaagagaagtcatttcacaaatcaaaacaaaggctgccttaaacttctccttgataaatggtcttggcagcttccaaataaaactcttttattaataatacataggaaaactgaagacagaagggggaaatagtgttggcctctcagaaaccaactttcctatctaggccatgaaaatgcaatgctatatctgatcaaatctgttcctgaaaagaatctgaaatatgtcctaggtattggcagaaagtctttacttggccaatgtaagcactcccatgctgcttacacagacatctctggagcttaattgttgtccttgaggtatatcttaaagataattgtatgttccatgatgtaccatgtgcacagtgtaccaggtgaaatccaaattattgcataacataggaaacccaaatactttgtacagagtgagaacatctatttagttgacattgtatttatctagaccctgcttgtcttttacaatagagaattctatccgattttgtgtcttggagaagagttgtataataccttccaaagtttatttgcattgcttgattgtttttgtaagaatcctccttctgtttctacttatttttctgaatttgtttctgttcatactaaatttagttatatattggcaagcccattaaaaattcacttttcctttattcatttttccttttttaacatactatgtttgcacattaaaattcctgtctacaatcatctttgaagcacagatgagcatgctgaagaaaaattaatgaagtgatcttatgtgctactacatatgtgctactatttcacagaaaaaaggtgatagtaggacaactgaaggaaagcttttgaatgaaatattttttaaatgcaagaatgtacagatcacagagcaggaagagactttgttctcttttgccaactcccatcaccgttcctcatttgctaaaagcactgcatcattagtttcccaaaaccattgataactttcctctctgttacatgagatcagaattccactaagccagaaaggagaaagtcaatgtatttaaatagcataggattcattttaatttgcattcttgtgccattgggtgcagtagtgactgcttgtattctcagtattttggagctgcggtaggagaatcatgatttccagtctagcctgtactacagggtgaaatcctatttctcatctatctatccatctaccctctccccttatatgtgtgcttgtgtgtgtatgtccatgtattaagatgtacccgtatttacatagaaaattaacttatatgttcatactatagtttgaatacaacaaaaataatctgaatgagtagaattatgcacatctctaccttgcataaaaagaaatctattgttcttttcctttgctttctcaaattttctttcttgcttatattaattaaacttctgctttgactttggagttcctgtggtcaaggaaagggagggaaaagaggacattcaatagatccaaatcttgacaagtcctgtatgaagaaatggaggctactcttctgcctagccagtttcaagttgtgagaatctgtaccccagtaaccacacagctgcagagacagagaacaacaatgggccaatcaagcacttgagaaagacccttatttcaccttggaaaaatattttatgtaattgatttcttgtgccagtactttctgcgaaaatcattgtatcccagttttatttatcctgaaatacaaacttcatctgcaacctgtggtatgctgttactccaacaaaattcatctttctttttccatataaattactcagttctctgaagaaaagataacatctctgaagactaaccttagacatgaaggggatctctttaagacaccttccatgatttgtacagcaacagcaatacaacataagatatactgagcatccctgagacactaatgaggcattgaaagcacatagaaacagtgtccttctctaaatgcaaaatcaacagctaacagagacaccagccagaaatgtatccttcttagcagaagggaccaaagttatttctgtcacttatagtaacatcacgttaagtgagaaaaaattacacaaaaatgctcagattaagaaacaagcccttattcagggtcatgccctccaaactgtatggtacatcaaatatagccatcaatcatccaccatagattcccattcattgtaacatcctctggttatatcttttgtattgactattgtatgcaaataaatcatgactagtttcagccacaatcctgacagatacagtaaagtcagagtggaaaaatgttgccaataatatgtatggaagttggttatgatatgatctggagtctaaaaccagagactctgaagtcagaccagagcttggtttgttctgaaagggagtacaactccattagaagatagataggaattgtatacttaataacatttccagtgtaagcatgttgcagactgcactgggttctttgaaattttcatcttaatctaggaatagtctctgcttacttgcttttcaaccattatcacagctcccactttctccttcatatacatatacaattcaagtcaaatgtcacaacctctagtgattttgtgagtttccatgtcacagcacattgtactaccattctttttcaggcaatggtttaaactctccttccaaaaatgcactgataataatcttatctgatataatgttttatttagtcttggttctgaatatctacaagatatggggacctcacaatgagcattgtaactgcttcttcccatgcttcctcccattcatgcagacattccacacagcaagcaaaacattggcttattgaagataagagtacgtgactttcaatagagaaaagctgattgtgtagctgtataatagggttcacaaaggttcaaagttaaaaggaaagaaattaaacatgttgttcagtaagacgactgagagaataatagagacaggagcacctgcagctggataagcagtcagggtcggcagatgggacaaggaatctttctattaaaataatcacttagcaaatggatgcctgcaagttccccacaactaagatatgaaaacatgatggcaacaaaaaaataaataaaataaaataatgaccctaccacatgtaaacaaagtagctactctctagaaaggaaaaaccaatgggaaatgaaaagaatgacaacacttcagtgaaggtagatgactcaagtgttcagaaaccaacttttccatttacaaaaggtgcttttatttctaccaaatcaaaaatacccaaggttccaacaaaaaagatttatttttttaactacaaaaggaatgacatttcatagaaactgaaacactttgttttgcaaggtgtctactctgagccaaacacaatttaaggcaccagagacataggagatattgaaacaacatcccaggacttacagaattactggcattatttaaggcggtagacaaggtcaaatacacaaattaaaaattaagtggttacaagtgctaggatcaaaaatgaagttggtgggtaggaatcttggcgatgtgattttgtgcatgtttgtcagagaaactcacaccaaaagagtgctacttgtctagtaacctaaagatgtaacagaacaagcaattgacaactaaagaaagtcaagaaccccaagatttagttttcaaaagacagaggatgcatttctgatcatatttgttcactccttataacttttgaagagtaagttaaatatggcaatggagtgtatttctaatcagtttgtctaatcccttaagttattataaaataatatagatacagcgttaatcacattccaaacatattacaggaaagcttatcattgctcacacagaccaaaggagatacatgtatttagtctttggttctttaacagtggccagttcggctatttagaaaggaagtagaatcacaaagttgtgatataatagtaaccatccaaagtagttgttaaaaattaatactgaaaatgttgacaatataaaaataattggcctttcagatcttatgatttaagggaaaaggagccactgaacagaaaagtgatgaatttttgggtttcctccatagactacaagagagtattttctatctattcatagttgacaactgtgtttttaccatgaaactcttgataaatgtaaacagatccctacccaataaaaatcctctttatttgtagaatttacatgttttggacctgcacatgccattaatatgcacaactcttcccagagccaagtggcagatgtaccatgctgatgagaatgcctccctgccttccagtctccagttcatgcctgaattcacaacacctcatcaaaatgctctgttggcatggtctcttctagcagtggccaaattatcactcctaaattcacactaacaggacagccagacagacttttgaccatgatggttcatcatgggtgctcagagataacacatcttaggagcagagtagttcaaatggtctttatttcagaaagctctaagaggtgatgagcaccataaccattagtcttggcaaccaaacagaagttagggtctcctgggaaagaggcctcaggtgcttgtgaagggtaatctgactgcacactttgaggagtgaagaaaggtctctgtaggtggctcgattgcctggctgggacatccaggacaatcgagggttacttgggacaagaaagggagccaaatgcaagcttccttcagatttcgactcctgaaagtggatgcaatgtgaccagctgattgaggctcctgattcctttatgtccccagtctaatagactgtgctctttgactgtaagtcaaaataaatgtttcctcctttaatttgctctttccagtgcattttatcttagcaatggggggagaagacaattaacactatccataaattgacttctaggtcaacacttcggtctgatactattggaccaatgaaattcaaatacagctacaatcatttctgtagctagtcaccatgaacatcactgacaaagaaataactccccaaccccctggagctgtctccctctttatctccttagaagaccttcgatattttattttcccttgtcttctttttcagagtcaggtcaacccattttgttccccccagacttatcagtttcaatatttcagtgttcttgccatgtcattacagttgctgccttttgctggcagaagcaatcctcagatctgtgttattcctttgcctttgttatacctctgtgaacttctagacaacaatgaatgcaaaactgaacataaattatgctgagctttctctgtctgtctgtctgtctgtctgtctctctctctctctctcattctctctctctccttctaacagctatctcattttatgtgagactgaaattcagtaatattaagaaaaagagttgatttcaaaattctcattattcattctcctatgtccataattttttcttacaaaacatgaaaacgaaaagaaaccccatgattacaaatgaaaacattcatgaagtcagaggtagctactctgctaaggagccactatgtatagtgagacctgtccccatccatgatccagattcttgttattttcatgtcttgctccagctagtttgcaccttttgcacctttctttttctccacaatacgcatggattttttaaataattgtaattaacaataatgaaaattatcccctgttcatttactacatgctgcttattaagtagcacatccactagaactgctatttgactcttggctcttgttagatgaaagagattaacacaaagctggttttattttttaattttttttagttattttttttgtccaactgctccagaccatgattagcaggggcagggtccatttaatgtttctgatagttacaaaatacaactagcaattgtgtattttgtataataataatactcatattttaataactatttaaacaaccatgatcattgtgctttaaaaataaaacacataaagacaaaagtgcaataaatataaatatatacatgagtgcttggaaaaacactattctcaaccctttgaacctcttaagaaagtaagaatggtcacagagactatggcaacatgcacaaggcctgcctaggtccaagccagcgctagtgctgagagaaggaagcagacataagctcctgtctctaaccaaggagctacctctcactgacaaccacttgaaatgaagaattggattttccccaacatgcccagtatattactgggtatattagcctcacctaagggtttatatgtcaccacacccggcagtagttggcgaacacaaaatgaaaggtactcctggagaaattctatctcattttttttttttttttgcagttttaacttactggtcttttgcttgtatattggaacttccaattttgtggcttttatatggtgtggtgtagtgtgtgtgtgtgtgtgtgtgtgtgtgtgtgtgtgtgttgtgttttttctttttcccctttcattgttgttgtcaattttcttttatgcctgtttgttttctaaagagaaaaagaaggagtggcattagatcgagaggtccagaaaatctgggaggtgatgaggacaggaaatctgtaagtagaaaaataatacaaagacaaatattttcaataaaaagaaagacaaccataatgatttaaattatcctattccatattttaatgaaatatattacatatatacaaacaggcctatataaataattcaatatgctaacttgaatagaagggaagaaaaaaattactgtcttaggtcagacaaccccagaaacatagtcagggaagtcagatttgggcacatgcaccttattaaggagaaagagaaaaagatgggtgggtctgggcagaaatgggagcaaaatgaagataatgttattcttagttggagcccaccttccaccccagtctatattgggcttcagagtttcccatgtagtgcagtcattactgggtactggtgcatgctgatgattgaatgtggataaggtaaggtagaaataaaatcacttcgttttatgttcatgttaattcaatcaatttttaaaattggcctcattctaatattggaaaatctataagttaacttaaacatgtgatttcactctttcaaccttgatgttctgaatcaagttttcccagtgaaggactagtatctaattcataaatgttctaagtttaaaatatagacttgaggttgaagacattaaaacacataaattttatctttctaatatttgctacatgctaaaagaatattttcttacccagtgttcaatagccaacaccacaaattcacaagaaaatttaaatttggatgcattatataataaaatgtatcattaaaattaaatttacctattcccccttttaaaaagcctttttttcataagctactatgaaattgaaaattgtattatatgtttatagcagcagtgttttaaaacattcctctgcaatagggttttatgtgatgatggaaatatactataccagcatggcctattgcagtaatccctgtcatgtgtgacccttgagcccctagaatgtcactattgagtcttaggaaatggaatcttaattttaattgtttaaaagtgcatttaaacctacccctgtggctcatggcagccatatgagatggtacaattggacagaatactgaaagattggtcacattaatgtacaaaggatcagggtttttaacttcttgaaagttagccatggttatctataaaaggctgccaagctcttattccagacaaagtcagttctctgcaggaacatacttgaacagcaagaagtcatcattcatggtggtatgggctaggtaaagggaagagaggaggagcacattcactgtgaaaagtaatttatatgaaaaagaattggtacacacacaaagactcatgctaaaggaaagttgaaaagaatacagagtatctaaatatttacatccatcaatagaattattataaattaagagctgatataatatgatatattacgacacaagtagatataatatgacacaagtagaatgggtagaaattcaaagagcatattgctacctttcataccatgattttgtgaaatatatgaaaatttgggaaagtatgcattgaaataaaaaggccacttttaggcaggcatagtagtataaacctatagcctgatcactagagagaacaggtagaaacactatgacatagtcaaggacaggctactcaaaactatacaacactgtgtcaaatagagacctgaaaatggtagagagatgataactttatgtggtttcctaaaggagtttgaaggaagaaatagggagtggacatgactcaaatacattgcacactttctcaaagaatacatttttaaaacagcaaatatttcaaatattttattcaaatggaataataattgtatgttaaaatatccatataattctgcttcaaaatcccttatcagcgagatacagtgtggcatggctttaatgccagcactcagaaagcagagacacacatatctctgagtttgaggtcaggttggatacctagtaagttttagggcaagtattgaggcccaatgtcaaaacaaaacaaaatcaaaatcaaaaatttaaacaaaacaactgtagaacattataattttcattttgttttatgtggacatctgggcttcctcttgtcctgcactagtacttgcaaactggtgccttaaacttgagaagggaagaagaggaagtatacagaggtcatgagggagttgagtcaggtgaagaatagaagaaacggtatgtgataagtagggttttattttgggggtgtggtaggggaggaatggagggagaagggaactgggattatcatgtaaatcaatcttgtttctaattcaaataaaaaatgattacaaaaaaactttggggcagataaaattcccagacaaacaattccaactcaacctttatctccaccaagaactattaggtgggcaaatttattttaggaatgaggagtaagaaagtgctatgattcacaatggcataacccatcatctccagttaaattccaaggacattctaaaagctactggctgagacatggacataaatgcatgcatacttacatacacacacacacacacacacacacacgcacagatcattaggaaacccagagcaccagtatgataatacaaaagctatcaaaattgtacatttcaccaataagctcatgtcagctagttttcagtgtaaaatgtgatttaaaactctattcaattggtcacatgcatacaattacatacatatattaataatagaacagtggaatttgtagatatacatttccatataatattagattagaaaagagtgcccattgggacttaatgaccttctaatgctttcatcatgaatacagaaattataataattgacaaagaaaagatgaaaatcaatttagagaaataagtgcttttcttcatatactgcagtttcagcctgagtcttcatgagtggctttccttgggcctagaactgcaaacccgtgggctgttctttcacataggaattctaataagaatataaattatttttatactgtgtgaacaccatatttaaaaacaagtccatgaaagctctcaggttcttagactcaagagtactccagcttcccccttttgatacactgaggttgttacacatgttttgtggaaaagaattagagcaggtctaacactcacttgccttgagcttgtcctgaaagacaacaaagcatgtaaggtacaaagaaaaggaaagcagattgccatctcattaggcagatgactgaaaattcattagaatgtgcctgtaaatgtaactgcccctctacttcacttttgctttccttaggacctgcatattctgaacaaggcttttagccgctgtataaattatgttttccttagaaagaagcaataagtaatcagaatagcctcagcaggcagcagtatccatagaaagctaaatttatggggaaataattgctattaataattataatgattgctatgcagagaaaaatgccctcccctgaagccagctccttatcttatactgtgagcttcaaagatcctggttttcagttttttttcagtttccaacaaccacttaatttatttccatgttgatactggaaagaggaagaatgtcattttgttagatattatgggaggggaaaaagacaagaaatatgtcccacaccttgttttaactatctggttgactgccaaatcctgaaatttttctttatacaatgcttttgatttatttttcacctcagtttttactcaactctttgtgctgaacatagttccccattctaacatacttattttgagcacatgggaagaatagtcttggctatggacacagtgtggtcttctgttacaagaaaacaccagtttgccttcaagctacaatattatggctttgctctgccttctctctaacagaaagaactggagattgctttcatgaatgaatatttcacttatgctcactgctgtgcacaagcaagaaaatgtaattttgcaagtacagtatggatgttcaatgtatcatgagtgggtaatccagtgtaaaaggatgggctaaaggactccatgggctaaagtagatgttcctggaggggccacttcaagattgaaatgtggagtcagggacaaacacatgaaaacctgggacaatgacttcccttccacaggtccctagttaactttcctccgtctgtcatatgaaaatgaaaacatgagacacctctttacatacagataaaaatgaatttatcaacaaaggaaggcaataaatggctactaatagggattaaaaaatggcccaaaataatttggttctgtactaactatatcccattgtctctatattattgactttctaataacactgtggtaaaccagtgtcttccctccaaaatttaatttccatctaaatatgaatcattaatccctgtgtttccttatactccttattgcatataatatgtttcctcaaatagactatatgtatatatattgtcactggggtatatcttgcctacaatctcacaggtttgcaaactcacacaaaagaacaaaagaatgaaaactaagattctagggatatcaatagtcaaatcaggcaacatgctcacctctaagtgatcccttttgtaccaaaaattaacagtgtcacagaagtggaaaaattatagaaacttattctggaattagactgagtgaaaataaggcagcatgcagaagttttttttttttttttttcattcaataaatatcttggccactgatgctggtgatttcagggacatcttatttagtccacacaacactaaataatcagagaatgcctctggcttccatgtaaatgagactggtgtctggggagatagaccattcatttccagagtagttttatatttcttttctattcttctggcattctattttgaactgggtgtcatcccccataagtcttcccaaatttcagatttataagtagacttgtggccaagaggataagaaattgacctgaacatgatgcttaaatgcctggcacagacatgcagaccaacttcaaaatgaagaatgagagtaagtggaataaggcaccttcgtagctttgttctggaggaataaaaacttagaactgagtaggaatgctttacaattattcttaaaagactgttttacactatttagatgattagtacaaataactttttcttagcataaattcgatatttaatatatcttgtactttcttatttcttatttttgcagtgtgtgatcacatagtttatagtcaacagtgacagaggtttacacctgaaccactgacattaatacgtcctttctgttccaggagcattcttgcccagagaaacaaaagttgcaaatgttatttttttttcagaaaattttcagaaagccattaaatgtcatgcaattgatcaatgtgcagacagagaagatcaaagaaatgtttcctccctagggtcctaaaactacttattctctcacattgaaattcccatcttactttatgcatctgcggaatatgccaacatgaactatagttagttagttcttacttcacaggcccacttctaaagatgggatccaaaactttcacatctgctgttgttgttcttccaaaccagagatgctactaaaggctccatcgaggtagtgatataccttgccaggtttccctaaagaggtctttttgatggaagactattgtcttgattatagttctactcttacgataaaatgttattgccaagacaacttataaagtaaagggcttagtttaggttttacaatttagaaaactagagggttagagtccatgatgggtaaagtgaacgcagggcagcagaaacaactaaaacctcacgtcttaaagagcaagagagacaggtggatagaagaatggagaaggagggagagacatggttggagagggaggaagtgagagaaaaagtaggggaagagagagaggctgagaatgttgtggcgttttcaaatttccagatacacatcctcctacagggccacacctcctaaaacttcccaaggaatctgtcaactgaggccctagcatttaagcagatgagcctagggtagccattcttattcatattgccacagctgtagagtctaaactcagaagccataagtttaaccacactactctaacatggtgcctatatgttgttgctgaatgtgtagaaggattatttgaggaggttttttttttgggggggggagaagcatgttgagtaagttatactttatagtattgtcctcaaaaagtatttttaaaatgctttaaattactatgaatcatattagtaagctctattagagctataaactatgctatttcttcctgattgtcaatgtcttcttaaagaatatttctaagaataataaaggagaaaaaatggagggctgagaaataaatgttcaaatcattagcaaagaactgaattaaattcaaacaacctgattattcactgatgctcgatgagtaaaatttcaaactcagattctataaactgttttctggtgaagctatatttgaaagaatcccagcatttaaagttgagtttgtgcctcatcagctgtgaatgctataaaagataaatatcacttgttgaattcatgcaagtaaaaagaaataccaagcatttaacatattgggccactaatatttattttaaggttcttaagggcttttcaagtatcttcagtaaatggttttccagctatctccttgaaagagttgtctttctaaagtgttgggcatttgtgtgcccaatctctgtgtctgaaaatttgaaagccccatgactgaattaatcaagaatcaatattgaaactcaagatttagattcctattcatggttggcaagacataaggagaagaatatcaattactattgtgtcttgtggagaaaaataatgcaaatagatgccaccttagagactcaaacattatagatgtagcctgtcaggaccctaatatcccaggggactctctgctaaaaagaagttatattcagtagactgttggcagagtaagtggcaatctttgaatttcagttttagtctgcctttgaggaataaaaagactttttcctcgtatacaagatgggataacctacaattgcatctgaaggcagagcatttctgtagacaagaatggttcaaatggaaattaaggacaaaaggtagcctgatgatttggggtttgatcctgctgggcagttagacaaaatagattgtgaaatggttttgcctacaacaaaggcctacctgaacaccagcgcattaatcacagacagttttaattactgtgatattgattagtacagcaactatgcagagcctaagccagacactgtgctttactgagctagctttttcttttctctctccctctctatcctcagttcatgaacagctggcttaaccagagtctattttaagaacctaaaaggagcaaagacgaagaaagtaaagttgaagattgtgcagggctacattgaggagatttggaagaactgaattcttcaaagaatattctagaaagttttgtacctctgggtattgactctgtcagttcctctcagcaagttcatgattatgactactcagttttcttccctgggtagaatatgtgtagttatttctcaagatgtatattttggcataattcaagaactgtgtttggacatcatgtctgtttggagctgttgggtattcctctttttggaacccactgtcttatcataactacagtttgtgataatgatatataaattccttgatgaacagtcaaacgtgtgaaaaaaaaaaacatatcatgcttacatatttggccccagtgagacatagatgaacagggaattggagttttattatttttactataactaatctaaataaaggtagttttaagcccttacctactgaatcataatgaagtataaattaaaagattttaacttcaaaattctcacttaacatgttttaatttatttttatgtgtatatatgtatatgtgtatgaatgcatatctctatgggggtatgtacacacatccacaggtgtccgcaggagccagaaaagggtcatatctgctaaaacaagagtaacaagtaattgtcagcttcctcacattggtgctgtacaccagaatcttgtcctctttgagcacagcaagcattcttaactgctgtgctatctctccagcccatgcttttgtttgttttttgaactttttaattgacttaagatattttataaatattgaaaatttcctattcagttttcctacccatgcttccctctaaatgagctccccaagtgtagagtaagaattgtaacagactcttcagagagtaaggaggtagactagcaaagaaaatttgatcttcttatgtggcattactagttcttctgccatcacagatgctgaagcaggtatatctcattgtttttcagtcactaagttaatgccacccaagacatttcagatcataattgatgaataattctctaaatctttatattcttgatcataaactctctacatagtatacctccacatcctctgccaaagcttaagtctatcagctactcagtatgtctgtggctctatgcaggactatggttattcggatttcctttaattcctcagtgagcacgaactttacaacactggtctagccttttcttccttgaacaaaatatacaggcaccagtctaatcccctttcacagtattgaactggcattaagacaagtggcacttatcatacaggactgcatccccccccttggctctaggatgtaagacagtttattaagattgttgtgaaggaagactggaaaaaacacaggcactggtaagacttccctgatctttgctttcttcattaccttttctctgaggatgctgcactcaagatagcaagcattcagaaagaaaagggcagttttgtctatacagtgagtttcaggtcagccatggcttcataatgagactctgtctcaaacacaagaaaacaataagcctattagactgaactgtaaatgaaagtaaggtgtcaacagcttatataaatacctaccttgtttttgtttgtggcatgtttctgtgaaacaatgctaaaatgtctcattaatcctcttagtaagtcgggcgttggtggcgcatgcctttaatcccagccctcgggaggcagaggcaggcggatctctgtgagttcgagaccagcctggtctacaagagctagttccaggacagcctccaaaaccacagagaaaacctgtctcggaaaaaaaataatcctcttagtaaacttaaaacacgactataaacatttatcttttatgatgaaatgtacatagttcagttgccaacttgacacaaacataatgtcacctatagcaggaaacctcaattgaagaattccccacattagattggtctgtagccatggttgtggggcattttaaaaatgctaattgattatatggggggtagactactgttggcagtgccattcctagacaagtgagtctgacctgtacaagaaagctggctgagcaagcaagagagagtaagccactaagcagtattcctctgtggcctttgctctagtctctgcctccacatggactccattcttccatgatggactatggtctgggaagagtaagaagaaatataattttcatcttccctagttagttttgtgttcataatatttcatcaaaacactaggacattaaattaggccaagatatgcataggcttatgaaggtgcagtaaattactcagatatcatctagctagtgtgtgataaaactcattcacatctaataatgagtgacatgaaaatgatgtatataatttccattatcaagcacaagagagtgaagaaatacctcctgcatgtgtacccactcatgtaaaataaatacccaaggacacagaatcaacaaaaatcaaacatataacatggaacacccatagattattacttacctgcagcacaacaattgtgtttgttagaatttatggtgagtttacctggctagagatcatagagaggatttatgacctagtcacaaatacaagaaaaaggtcttcttagagtttctagataaaaagtgtttgtagatagacacaatcaagcacctgggtcttgagggaaattatttatattaagtcattttgctcttgacatatctattgtgggctttgtttatcctgagaagctataattagtaaagcacataaattggaagtgaccacaggaaatcactgcaagacggatgttttgaattgattttgtgactggctttaagtcaggattactctattaaatgaagaaatagagtccaaaagcacaagggatttggtcattctatcatctgcttatcagagacagggtgttcctgttcaagtgagctactactaaaggatactacattgatgctcaggatccagagactgggattgagctggctgtttcttatggaacagcacagcattggcaaaagagaattatagctcaaaaccttgaataatagaccttccttggattacttcaaacactcaccagcatcaatatatttagtctttcctgcattcttaagatgatcttaagtctttcatagccattgactgagagatcaatacattggacatagaagttacagatgtatagtcaactgaattcttgacccagccatacctcttctgggaaagtcagcatgttgactaagagaggacctgctaggaaagtaataggattatatgaaggagttgctgtaatggatgtttcctaagcttacaaatgatagttatgttctcttgtctaagtggtaactcatgtgcacaatgaagataataattatatcgactatgcatttaatataatgaaaattcaatatatgtagttatatgtttaaattatatacacacagaaagcatagagatccaaaacataatatttatagaattataaaagtacaaaaagatcacacagcttaaagcaccatttattgttctaatgtttacatgaaatttagattcagtggcctactaaatcaaatcaagttgatacattagaaatcccttatagatcaatactggcagcaaacagattccctacttcagttccctacaggatagggaaactattttgcatttaaggtctaggccaaaagtcaaatccaatattatatccccagtgaaccagaacaattaattcccccagaaggattgatggatgttagggtgatgatctctagcctgtctccatttaagtagcagaaggtagattagtgttgagagaagatggatggctcttgtagaaggacagtgaattattttttacttgatccagtgattatatgtagccagggctcttgcttctcctacaatcccttaatgcctgctacttacatcattctgaaaactagtaggcacaattttatttaaattctttaattactactcatatttacatatccatcccccaattccctcactctcccatcctcccatgttccccaacgccccccccaaaccaatcacacaactcttccacagggatagtgaggccctccaccaggtacgttcaaaatctgttatatagtttaggggagggcctaggccctccttgctgtatctgtgcttcaatactatccctccaccatagggaatgggatcccaaagtccaattgtgctctaggggtaaagactggctccactgttagaggtccattgactgtcttggccacctaggtggcacccacatttagagggcttggttctgcctaatgctttctgcagctttatgactagtgtctacatgctctaactaggtcaggtaaactgtttatgtaggtttccgcagaaccatcttgtcttctttgctcatccctcctccctctccacaactggattccaggggtgacattcagtgcttagctgtgggtgcctgtttctgtttcaaacagctactggatggaggctctaggaatggtaaccaaggtagatactaatctcattataggggaagggcatcaatggcattttatccagcactgcttggattcttagttggagtcatccctgtgattcccctaacttttcccctgtgccagacctctctctaaacccgtactgtctttctctatcaaggcatctcctatcctgccctcctctattcatcccctgtctcagtcctcttgttctcctcccccctcccattcttgacttctcccctccatcctctccacccatgccctgtgtatccacattgttcagggtttcttgtcccactccccttattccagggactacacaattttctcttgggatcctacttgttttctgtctcctctggcagtgaggatttgtagactggtaatcatttgctctatgtataaaaatcatatatgagtgagtatataccatgtttattttttgtgattgggttatcacactcaggatggtttcttctagttccatccatttgcctgcgaatttcaagattccaattttttttttctgctgagtaggattccattgtgtaaatgtaccaaattttctctatccattcttcagttgaggggcatctaggttgcttccaggttctggctattgcaaataatgctgctatgaacatagttgaatagatgctcttattatatgaatgtgcattctttgcatttatgcccaagagaggaattgctggatcttgagataggctgattcccattttctgagaaaccactataatgatttccaaagtggatgtccaagtttgcactcctaccagcaatggaggagtgttcctctttctccacatcttcttcagcataaactgtcattggtgttactgattttagccattctgataggagtaagatggtatttcagagtagttttgaactgcatttccctgatggctaaggatgttgaacactttctcaagtatctttcagccattttaaattcctctgttgagaattctctatttagttctgcactccacttttaattgcattgattggtgttttggtgactaacttcttgagttaattgtttattttggtgatcagccctctgtcagatgtggggttggtgaatatcttttcccattctatgggctggcattttgtcttgctgactgtgtcctttgccttacagaagcttctcagtttcatttattaattgccaatgtcaatgtttgtactactggtgttatgttcagaaagcagtctcctgtaccaatttcttcaagggtatcacctaccttctcttccaggaggttcagtgtggttgaatttatgttgaggtctttgatccattttgatttaagttttgtgcatggcatagatatggatctatctgcaatcttctacatgtccgaatccagttatgccaacaccatctgttgaagatgctttctttattccattgtatatctgccatctttgtcaaaaatcaggtgttcataggtacatgggttagtatcagggttttcagttagattccataggtcaacctgtctaaatttgtgccaatatcaagctgtttgcaagactgtggctctataatagagcttgaagtcagggatggtgatgcctcaggaagttcctttattgtaaaggattgttttggctatcctgagttttttgtttttcaatattaagttgagtactgttctttcaagttctgtgaataattgcgttgggattttgaggggaaatgcattgaatctgtagatttcttttggcaagattgccatttttactatgttgatcctacctatccaagatcatgggagatctttccattttctggtatattctttaatttctttctttaaagactcaaagttcttactataaaggtctttctcatttttggttagtgttatcccaagatattttatgttgtttgtggctattgtaaagggtgatgtttctctgacttctttctcattgcatttatcatctgtatatagtaggattactgatttttttagttaattttgtatcctgctattttgctgaaggtatttatcagctgtagaagttccctggtagaatttttcaggtcacttatgtaaactgtcatatcctttgcaaatagtgaaattttgacttcttcctttccaatttgtatccccttgatctccttttgtcgtattattgctctagctataacttcaagtacaatattgaagacatacggacagagtggacagccttgtcttgttcctgattttagaggaatcgccttgagtttctctccatttagttaatttttctccatttattttgatgttggctgttcctttgctgtatattgctttgatcatgtttaagtgttcctgttattcctgatctctccaaaacctttatcatgaaggcatgttgaattttgtcaaaggctttttcagcatctagtgagatggtcatgtggtttttccttttagtttgtttatatggtggatttacattgaaggattttcatatgttgaaccatccctgcaatcctgggataaagccaacttgatcataatggatgatatatctgatgtgtatttggattccatttgccagcattttgttgtatatttttgcattgatgttcatgaggaatattggtctgtaattctcttttttcattgtgactctatgtggcttggataccaaggtaattgtagcctcatagaaagagcttggcaatgtcccttctgtaggtttggtgttttgattattatgtgtcgaggggacttcttttttgtggtccagtctgtttggtgttctgcaagcttcttgtactttcataggcatatccttctgtaggttgggaagttttcttctatgattttgttgaatatgttttctgtactttgagctgaatttcttcaccttttgccatacctattattcttaggtttcacagtgtcccatatttcctggatattttgtgttaggtatttgttggacttgagattttctttggtcaatgactgtatatcctctaatgagtcttcaactgagattctcaactgagaatctctcttccatctcttgtactgtattggttatgcttacatcagaggttctggatcatttatctagtttttctatttccagcatcatctcattctatgttttccttattgtttctcattctgctttcaaatggttaactatttaaattgtttcctttacttgtttgtttgttttttcttggctttctttagattctttaagagatttgtttatttcttgaatttttttgttttgtcttttgctccatttcatttaattttttgcttgttttttttcttctatttctttaagggattttcttgtttcctctttaatggtctctatcatcttcataagataatttttatgctccatctcttcttcatcctctgcatttgggcttttcagatcttgctggtatggagtccctagattctggtgatgtcatattagtctttctgttattcagtttgttcctaatctgttgtcttccattccattcttctagtgggtgcagctggggtctctccctcttttaggtggcaaacagagggcagagggcagagggcagagggcagagggcagagtggggacaagggtgatgtgcatcaggactcagggtgggacttcaggtgtggtcagatccactcttgtcaagggggagggtaaggaaaaatcaagcagggggttatggggaaggttgggggcagagcagcacccagactcccttcaggcagcaggtcgcactttttaatgggcatgttgcttattttttcacttatccatcttaataagtggctgtagcttatctttatgtcagaaatgaacaaaaacaatgattcccttacaatcttcctaagtgaccttcaaatgtattcatctgtcactgtactacactccattacattgacaatattatagtgtctaaattgggtgactaacattattgaaagttactgtcatgtatgtatacacacacacacaaacacacacacacacacacacacacacatagggtgcaacctgcatagtagacaacagtctgcaaacattaaaaacattgatattacctccaatgtgaatagtcccattaattacccttgacacaattatttctgcctgttctccagtattaaagtttgagtctggggcattcctacaggtttaagtacctgaacacttgccaggtggtggaaatatttggggagattatcgaaactttgagcctactttgcaggttgcatctacttgtaatctcatctggattattagcaagctcctgctactccaaaacagaccacactagctaccatgcttgtcttgccattacatgggtagaacccccttaaagtgagcccaaataaacccatcctatctcaaataaattgtgtcaagagttctgtcacacttttgctgaaatcaactagcacagcaggcctctgtggctttctgagatatactgaagaagatttgctgcccatagtagaagccctttgtaaactggaaaccaggtctaggaacatctctttgtttaattcttctcattcttccagaatctttgtgaaatttcctaaatctcctttaaagaaggaatgaaaggactcaggttgcgcaaaggagaaagagaagagaggtgcaggaggggtaaatgttagcaagatacatgaaatacttgaaagaacatgtcttgtgaagcctaccaccaggtaaaaaaatacacaacaacaagtcaaaatgaaaactcacctgcatttttatatataattttttaaatagcaatcaaacactggtgacattatagttctgaatgctagctgctcaaaatgtaattccctgggtcccaaatcaaagcatccacaggcttcactctcctcagaaagcactagaggaatgttcacctgcttgatccttggtgtctcttcttttttcattttttatttgaattagaaacaagattgatttacatgacaatcccagttcccttcttcctcccgtccttccctacaaccccccaaataaaaccctacctatcacataccctttcttctactcttcacctgactcaacatttctgctccctcatgacctctgcatccttccacttcttatccttaagaccagcagtagacagtatagactttaacacactgtcatagaaacagttataaacataactccatctcaaactttattcacccttgtcatgcaacagaagacatctatcacctcctaggactagacacaggcacattcaaaggacaatatttgatgtaccatctattacttccccttgacctcatttttccttgcaaaggaattctgtttagtatccttggttgttctctaaatctttacagtagcaactattttctactggattcagaagataaaaatgaacatgtatggctcacttccctctacattttcccttaggtttcttatgtgcagattatggattgtaaacttccctaatgatacctgtgaatgtagggaactgagatagaggatgcctttaggcctgtagaagcgagaaaaagtcatcaagtcccttggatccagagttacagcaggttataagttgtctaacatggctgtcatgggtgttaggaactgaatttggatcctctgcaagatcagtaaatcctcttaaacacttagcaatttctctagctctcatttaattttatgaattcattatttagaaagaaatgtaggtgacttctataggggaaaagggatagtaactataaaagtatccctagtagaaattttttttttcactttgaagttacttatcacctaagcctattttctagatcaatttccttggaggaggctcactcaaatttggaacagaaacaaattctggcatcattacttgggttttacttttctcttggcatctttgtgatctgacagtcgtgattcaggctgtttgttctgatttcttaagaaatattgctaatatttctttcccatttctttccacaacaggtcaaaactctgtggagtttactcctagagtagaagaattatctgatgttcttttcctctggctgggcttcctgtgaagattcctttgtaacacattttctcaattaaaagaggagagagagtgggagcttatgggccagctggactacactctacagagctgcttggtttccttggaattcccccagagatttcatccagtggttctcttcttccttcgtgttttcaacattcagcattcttcatctaatccatagaaatgttatgatacatgtcattagatagtccaggtggcttcttggcttctccaacgctgttcttttggtcatttctttgggtttctcaaccaacatctgtccacaccaccttagatcttactataggaagccatgacatttttcagcatcttcctttgcctttgctcctatggtctctgaggtacatcttttaagaaatctatattgtgtgtgaatttgacatcaatactgtaacatggctagacctctgggagtttctgtccttaatctgtgctttcagttttacaacttcctgtcatcctcaaaataatatcatgatcattgttacccagaagtttcccagatatgttatcaaaagaccttacttctcctgggccctttgctcctgatggacatgtctctgctttacattctctgtcagaattgaagatggtatgtgttggcttggtttttggctggctctctgcaatctccagagctttgtgaaccagcttttctgacatgccttttggttgccgaatagtcatgactgtcttcaacacacttgccttgaacatttatacctaatggattttacaaagtaaaatatctgaaatgctttccttggcttctttctagaaaagagatgtgcagttgcgtaaatcatgcctttcgtcctctgaagcatcatctatcctctgggtgttatggtaactaccatcgtcaaagcctacattgcatagagccttaagactttcctgtattttaaaggcaaaagagaggaagtgaggtatctactttcctcttctgaaatgtgtttagacatcactgtatgaccatgactctgggaaatgaattgtcaaatatacaagaaaatcttgcataaccatgttcattgatataccagtcaaaagagtcataatctggaattatcttggggtcaacagcagcaaagtagatgaaccaaaatgcttcacatgtacaacagaactttctgtatctataaagaaaaatatagttgtgaccttggcaggaaaacaaatgaagtaggtggtcaataaatgaaataacactccagaaacacaaacactgaatgttttattttgtgtagaaaatccggatttacatttagatacatgttttgtaaataagtacaacatgaaatcacaaagaaaactatgagaaggggagatagacataaaggtaggggagaggtaaacaagaggagaaaaagaaatatgtaaaacctggatacagaaaggaagacactttaggggatggaagggaacaaaaaatggaggaaaggaggagaaaggggaaggaaattggggtatagaaacaagtaagaacaaaacataaaaaggtatatacacatgaaatgcatagcaaaccctagcattttttatgctaaatttaaaacccaattataataaaagaaagacaggaaatgagatgctgcatatttcctgagactgatgttgctttctactcctctccatgtttgctgctgaacaaaggaagctgctgagtcagtaaaacaaggcagttcactttccatgaaaatgctactggcatcctgaaactctaaagaagtctgttgttactgagagtatcaaagacaacactgtccttcagtgacttctctcattcagggaaatcctacaccctgttaaaagcacagaatcttgagtgcaggctgctttccatttccttctgttcatcacaaagactctctcttctcctaagtggaaatttacaatgctcctggatgaacaggtgataataaatacatgtgaagtcatgtggagccttgggtatttgcagattctgtcactataccctggttgagggaggcttctcacagaatactctcagtatcttcctttttaaaaaaaaactgtcaggtcacactcatagctggctgattcaggtgagctactgggagagtcacatagggattgttgttcattataagtatatacttattcagactttccctcttgctccctctgaagtttttagatttatgatttatatacttcatcccatgactgatgataacattgtgagcttttttgtgctttaatgacgagatttctttgttttcaaaatcagctaaggcctgtctctaattcttgatgtttttcaggcatcaaccatccatgcatagttatctgaacagtatctgatctcacatattctccatgcagtgatttcatctgcatctccaatcactgctctcaatcatgtgtatagcatcatcaccattagcatggcaagagatggtacttttgatacttatacatgcttaaaggtgacatttatgacatatcccttaaaatcaggccctatcacttcaaagagatccatctcagaatccagaggacactaatcctttattattatattcctttatatcattgctctagattctgctttagaactgacaatgtcattagacatgccatttatttccctaactgacaatgtcattagacatgccatttctttcttgtttatatttgtgtcaataccaagctgtttgctcaaaaactggttttaagctcgttcctatgatgatcatgcaaaagggtatatttataaggagaaaaggaattgaaaactgtttcttgaatatctgtcagtgaggtaagtgaagactcattatatgagtagactctggactcaacagaaagcagcagaatcctaattctttctgtataaagtttcttgagaatcatggaaagagacaaagaggatgaagaggtatttgtgaaacccttccccaccttcctttggtggtattagtaatttgatgagtcatggtttatattatctatgtttaagatggttattcgtggaacatcaggttggactttcccataattcctcataaccaaaattctacagctgggtcttctgttccagaaggtgcagcttcttgtagaatgccaccagtccatctttttgaaaaatgtatgtggcttgtagaatatggtctacaaaaccatgtaattttctagctaaccttatctagttcctttatcccaatgttgctttgttcaacaacatatgcatttggggggttcgagtctgttcctgtgaggttcacaatgcagagctttcctgggtcttcacttggctggctattggcaacagtctccacactggcgactggtccatgttgcacctttgtgcgggaacctagaaatatcctggtaacatgcgaaaagatgcttcttttctttgttataaacctgtgcacacactttctctcctttccaccatcaatcccctatcccatcccctttctgctccccagggagggtgggccttccatgggggatcataaaagtgtgtctgatcatttggaaaagaaactcccccatgtgtccaggctgagagagaatccttctatatggaatgggatcccaaagtccatgcacataatagggataaatactgatccactaccagaggcctcatagattacccaggcctcctaactgacacccacattcagggggtctgtattggcccagtgctgatttcccaggcatcagtctggggtccatgagctcccccttgttctgtgagtttctccagcctggtcttgactctttgctcaatactcctccctatctattactggattccacgagttcagctaagtttttagttgtgggtgtttgcttctgcttccatcagctactggatgaaggctctatgatagcatataaggtagtcatcaatcccattatcaggaagggcatttaaggtagcctctcttctattgctgagattgtttgttggagtcatccttgtagatctctgaacatttccctagggccagatttctctttaaacctataatagctccctctattatggtatcacttttattgctttcatctactcttctcacaagtgaatctttctgctccctcatgtcctcttctcccctcctattctccccttctctttttcctaattccctcttccatcccccatgctctcaattagctcagcagaccttttccctttccccttcttctggaggaccatgtatgtctctcttagggtcctccttgtttccttgcttctctggctgtgtggatagtaggctagtattccattgccctatgtctaaattccatatatgagtgaggacataccatgtttttctttttgtgattgggttacctcactcagaatggtttcttttagttccacccatttgcctgcgaatttcaagattccattgttttttttccctcactgagtagtactcaattgtgtaaatgtatcaaaatttctttatcagttcttcacttgtggggcatctaggttgcttccagcttctggctattacaaatagtgctgctatgaacatggttgaacagatgaccttgttgtatgaatgtgcttcttttgggtatatgcctaagagtagaattgctgaatcttgtggtagactgatccccattttccacagaaaatgccatactgatttccaaagtggctgtactagtttgcaatcccaccagcagtggaggagtgtctttctctacatcctctactgcataaactgtcattggtgttttttattttggccattctgacaggaataagatggtatcttagagcttttctttatttgcatttccctgatgactaaggatttgagcactttaagtgtctctattgagaattatctatttagttctgtaccccacttttaattcaattatttggtgttttggtgacaagcttcttgagttctttgtatatttttgaaatcagccctctgtcagatgtggggatggcaatatcttttcccattctgttggctgcctttgctgatcttgttgcctgtgtccttttccttacagaagcttctcagattcaggacgtcccatttattaattgttgatctcagtgactgtgcaacctgtgtaatgttcacaaagcagtctaatgtaccaattttttaaagggtacctcccactttctcttctaagttatgttgagatctttgatccatttgtacttaagtttggtgtatggtgatagatatggatgtatctgcagtcttctatacaccagcttccagttatgccaggacaacttgttgaagacgatgtctattttctattgcataactttagtttctttgtcaaaaaccaagtgtttgtaggtgtgtgagtccatgtcagtgtttcaattctactccattgttctacttgtttatatttgtgtcaataccaagctgtttgcaggaccctacctctgtaatagagcttgaagtcagagatgctgatgcctctggaggttcctttattgtacaggtttgttttgtctatcaggggtcttttgtttttccatataaagttgattactgttctttcatggtctgcaaagaattttgctaggattttgatggggattgcattgaacctgtagatagcttttggaaaaattgccatttttactgtgttgattattcctatccaagagaactggagatcttttcattttctggtatcttctttaatttctttctttaaagactcaaaattcttgatatataggtctttcacttgtttgattagcattcccccaagatagtgtgtgttgtccgtggctagtgtaaagggtaatgactttctgatttctttctaagcccatttaccatctatatggagtagggctactgactctttggagttaatcttgtatcctgtcactttgctgaatgtgtttatcagctgtaggagttcccttgtagcatttttcagggcacttgtgtaaactatcatatcatctgcaaacagtgaaaggttgtcttcttcttttccaatttgtatccccttgatctccttttgttgtcttattgctctaactggaacttcaaatacaatatgtcaagagacatggagagagttgacaaccttctcttgttcctgattttagaggaatcgagttgagttactctcagtttactttgatggtggctgttggtttgatgtatattgcttttattatgtttaggtatgttcctgttatccctgatctctccaaaacctttatcatgaaggggtattgcattttttcaaaggctttttcaggttctagtgagatgatgatgtggtttttctttttcagtttgtttatatgttggatttcattaatggatttttatatgttgaattatccctgtatccttgggatgaagcctacttgatcatggtgggtgatttttctgaacacttagattaaatttgccagtattttattgagtatttttgcttcaaacttcatgagagacattggcctgttgttctctttcttagttttgtcttattggggcttgggtagcaaggagtttgtagcctgataaaaaaaagagtttagcaatgacccttttacttattttgtgtgaaacattttgaggagaattggtactagctgttctttgaatttctggtagaattctgcactgaaaccatctggctctgggcttttttgtttgggagtcttttgacgactgcttcaattttgttaggggttatgtgtctatttaagttgcttatctgttcttgatttaattttggtaagagctatccatccagaaaattgcccatttcctttaattttttgaattttgtggagtacatattttcaaaatatatgttcctcattttatttctgactttgttaattttcatgttctctccctgccttttggttagtttggttaaaggtttctctatcttgttgatttgcccaaagaaccaactgttcattacattgattctgtgtattgttttcctagtttctactttattgatttcaaccaccaatttgattatttcctggtgtcttctcccccagattgagtttgcttttttgttctagagctttcagttgtgctgttaattgtctagtgtgactattctccagtttcttcatgtgattacttagtgctattaactttccacttagccctgctttcaaagtatcccataaatttctgtatgttgtgttttcattctcattgaattctaggaagtgtttaatttctttatttcttccttgacccaggaatggtgcatttgatcattgttcgatatccatgaggtattagggtttctgcaatttatgttgttgctaaatactaactttaaagtatggtgagctgataagattcagggggttattacaatgatttttgtacctgtttaggtttgctatgttcgcaagtatattgtcaattttagagaatgttccattaggtgctgaggagaagtatattcttttgtgtttgggtggaatgttatatagatgtttgttaaaccctttgtttctttgttaagtttctgtctagtggtcctgtctagtggagagggtggggtgttaatgtctcccactataagtgtgtgaaatcttatgtgtgatttgagttttagtaatggttcttttatgagtgtgagtgcctttgtatttgggccatagtcattcagaattaagacttcaccctgatggatttgtcctttgttgaatataaaatgaccttcttcatctctttttattaaatttagtttaaaatctaatttgttaggtattaggattgttataccagcttctttcttgggtccacttgattgaaaaatcttttctcaacccttaactctgaggtactgtatgtctttgaagttgaagtgtgtttgtcatattcagcagaaggatggattctgtcttggtatccaatctgttagcctgtgtcttttcataggctagttaagaccattaatattattgcttatgtttttgtgagtgtagttaacttccttgggttggagttttccttccagaagtttctgtagggctggaatagtgaataagtactatttaaatcttgttttgtcgtgcaatatcttgttttctccatctatagtgattgaaggctttgctggatacagtagtctgaactagcatccattgtcattgtctcttagtgttggtagaatatctatccaggactgtctggctttgtgagtttccatggagaagtcaggtgtaattctgataggctttcctatatgttacttgacttttttccttagctgctcttaatattcattctttattctgtacatttgtggttctgattatcatgttgcaaagggaattttgtggtcagctctattttgtattctgtaagcttcttgtactttaattttcatggctttctttaggttgggaaagttttcttctatgattttgttgaatatgttttctgcacctttgaggtgggtttcttcaccttcttatatacctattattcttaggtttggtctttttatggtgtctcacatttcctggatattttgtgttggggatttgttggacttgagattttcttttgtcgatgaatctatttctcccagtgtatcttcaatgccagagattctctcttccatctcttgtattctgttgcttgcatctatagttcctgattatttacccagcttttctatttccagcatttcctcagactgtgatttttttattgtctctatttctgctttcaaacattgcactattgtaattgttccttacaatttttgtttgtctttttccccatttcttgaatttttgtttttccattcctttgtgggatttttctaatatcctctttgagggtctctatcatcttcataagctatcttttggctcattctcttctgctacatctgtgttgggatattcaagttttgctactgtggagttcctacactctgttggcatcatattgatctttctgttgttgactgtgttcatatactgtcgtcttcccatcccttcttccagtgggtactggtggagtctctctctctcatggtggatatagtacccaagttcacttttggtgggtgcaagcaggtccaatattccaatggctgtcttcctcctatggatggagtcaggactagcaccaagatgctggcagactctggatgtgctggagcatgtggtcagtttcagggtgcagtccccaggcctcaggaagctatgacaaattaatatatttaatctattaacacacatgctagagactaacatggtatttcacttcttgaaagtaaccaaacagatcttaaatatcctctaaaaatatttttttgtttttttgaaacagggtttctctgtgtagctttggagcctatcttggcactctctctggagaccaggctggcctcaaactcacagagatctgcctgcctctgcctcctgagtgctgggattaaaggcatgtgcctccaacgccaggccctctgctaaaattaatgttacccaaacatcatttaataaacaagagtctttggcacaaaaatatagcaacacaatattgaggagaaaatacagaaggagtagttgagcaagcatgacaagagatagtgattataatagtagagaatttttgttgatggcattaagtgttaaaagtcatctgcaagcatgtcccttacttcatgtaattttttgctcttcagaaagagaactcagcacatactcctttgttttacaaagtacttgatgaattttataaactaaagcccacagatacaatctacaatttcagtttaagcactgatatctgcaggcaaaagtatatgaaaattatctctattagttttttagttgtgtataagatttgctagtgtcaagcagcacgcaattacgaactgaaatttcttatcattagaaatctgtttaagggttagtaaacatgcaacatgggtgtatatgagtggctcatgctcaccagaaatttgggatctctcttgagctctttccgataattggaactgtttctttcctcataactggagacacagatatcatttttttttcctggaaggttgttagtcagtcactcccagttccctgggagcaaattttgctgatcatatcaaactaagtcacttctataatagtggcaaggtctagggaacatcacagaagaagcagaggcaatggtaagatccagggaacatcgagtactatgaggctctgtcttttggaatgaagggttgttacattcacaaacacaaagcagctgggattaccgggaaaagacctgaacacacacacacacacaaaaaaaaaaaaaaaaaaaaaaaaaaaaaaaaaacataggaaagtagaagacagagtgacgaggaagaagaaacaggtcaacgggaggatatttggtgcagataaaagagtaatgggagcaaatacaatcaaaatacattgtatacctatgtgaaattgccaagacaaaagaaatatacatatagataaatacagaaattttaaaaagtacaaaacaccatgctaatgccactccattcttctgagatagtttcctgcatcatgtgtacattgtattctagggttttctagagtcatagaaaaatcagaatactagaaacattgtgaatggaggacatcagtcctcccttggtctgaagaaggtttcaccaatcctacttaataacttcatgtcattggaatactaacgttttctcccaatgtaggctggcactcaccactaactataaagagctgaatggagactcttagacccacttctgctgtctcttcctaagaacatcattactaatccaaggagccactaatggggtttaaagttacaatgttacaatgactgttacagagtaatacagtctttaagatgcacttctggggcttctaatcctctcagtaacacagtaaatataatgaacataaaaatgatctttgcagctgttgtgtttgtcagtaaaaataataaacccctcattctacagaagtcctggcagcatctggcacttaggattcacctaatttaatcatattgagtttcagcatttaccatcttacaagctttgtttactgactttcagggtttttatgaaattatactatatacaaatgtagatagcatggacctggtgtcctcactctacgggctccctgctctaaacatgaataaaagctacaatcagtacacccttaaaattttcaaggaaattttgatttctaccacaatgtatgtaacaaaattaatatacattctcagtctttttctacatatactatctttgttataccacagactgagagttgctcaaaaaagtcacccatgatattttcagcttctttttatccaaaatatttaaacacaaacacacacacacacacacacacacacacacacacacaaacacacacacgccacaacatatatcttgaatcaggatttcagaatacttgattctaattgatcacaatccccagattttgattccaaaaggaaagtaagacatgatttatgtagctgatagtccactgaattttttccagaaataatgaaaatttatttattctgtctgggttcctcatttgtatattgactagggcacaaattgctacttcttacaacatcggaaatggtaaggtaggacaggcttttacatcctgagtttgaataatatctaggcatcattacttaatatcaaattctatttagatacataacatctaagaaatattcaaatgttaaaaagtaaatgcatatttaaatttttattaactttacaagcttttgttctattaaaaatgtcatttgatcaaaggagtttgttttctgagattgcacaggctaacatgaaaggatggaatgaaagtagtggatcatacagatcacaaagctttgaagaaggattgggtaaagagggtggtggcctctctttattctcactctctccaaagtatattggctgagaattgttgagcacagacaaagtttctattgtagacattgttttatagtaatgtccttcggcatagaaccttccatcttgaaaggaaggctatttgaacaacaggatgttaaagggcaaatgaaacaacagatattataagcagagatgaaatattccattccacgggaaagcttttttaagttcagcaagttaacaactcaatagcttcaggaagttcctgaaactgactatatgcattcactaggatcacctacctccagtatatataagcagtaagtatttgtaagagatgttctcaaataatttgagatacctgggagaggtagagacagctgaactatcaggaataggtttgaaccaagtgatcaacctacaaagaacactcttcagcttattgatctgtgtgcaggttgtactttcacttcatgtttcctgctttcatgaacttccagggtaggagttattgacacatctggctttgacttatttctgttcctctaagtaatctcttacacatactattgcaagtaaccccataaacctcattgattcgccgtgttgtactttggcatatctattcattggaatgtacaaaactccctttctggttgagtggacaggtgttttgcatttccataggaaaggtttgtcataaaacactcttattaacacacaaatcacagattttatactctttatggcaagactggagaacacatacccagcaaacagcagctttaatatttgatagagatatatgcaatggccacccaccatatgtggctactccctacagaagccagtaagtcccatgagaaagccactaactcaatttaatgcagggacaaatataactttaataaaccactttttgcctacagctacaaatccaagaataatgatcatcttattatcataaattttacagaactgcaaagtcaaaattatttgtttcattgtagcatgagtgcattcaaaagtcaggaggcatacaacagagtgaaacaggaatggagaaggcacaacaatgtatgtctggcctgccaggcatttctcagatactttactgcccaacagaagcaatttcctccctcatttaagatttgttatgcttcatcatcttagaatgagggaatgaagagagccctgaagctggctattaaatgacagaagctcaaagagcaatgcagtaatagtgtcccctcctccataaggtacatagaatgttctatactccaggctttgaagagttagacactactacctatgaaaaattacagaaggaaaatgtggtctttaattgctttgtcatgatgtctatcattagattcaaataattatatcaataggaagtggtagatttcttaaatatgtcctcagcctcactaagtcaagactatgaatgaagtaggacctggaaatagaatgggatatctaggggcttatactccttatggggatactggccctggccacttttgtacaaataaatttgaagttcggctggtgtgataactgttactaatgtgcttaccatgcaagtctgagaacatgtgttcaacttcaagaaacatatgaaagagccacgtgtggtgacaaacaattgtaataccagtgactggaaggacttagacaattccttgggtttgctggccagatagcctagcatagtcagtaaactctagaccaatggagagccagactcacaaaaaatgtggacaacatctgaaaaacaacacttgagattgttctctggcctccatatacatgtatgaacatacatacaaacagactgacaagcattcaggtacacataaaaatcatcatagattcaacaggatggtgttaccacatcatgccgctttccataaggtttctgctctcttgtgttgcttttcaaaatttactgtgggctaacctagagacagttgtgtataaaatgatgcttcagcaatgtctgaaataatcttccagaaagtcttaagacatcatgtgaggttacaaagtatcccagacaccataaaattggattgcttagagactacatgcatagagaatggaagaagcctgatgccctgctacaccagagatgtccagagaggatgcccactgcatttccacactgcaaccacagggaaataatgtgccactcactgagcataaacatctaacctagtatagtaagcaatttgcattgtaggtgttttaataactagcaagaataatttgactagaagttgtcaccattatttttgtttgttggttggttgcggttttattttatttatttttattttttttcatttctaactacagttgtggtaagtccaatcttttaaaaagtttcctgtactttctttctgtctgccccagtgccctctgccctcttttcccttctctctctctctctctctctctctctatatatatatatatatatatatatatatgagatatatatatatctcatgcagaaaatcaaacctggacctcaccaggagagtgctatactgagccaaactcctagccttgttaccacatcttcatccatccaccttttgtagaacattttgacttaacataagatcatttatgtacacacagcagactaggataagactggtaagaatgcttatcctttataatattggatttggagatgaaagcagcagtcaaatatgaacttcactataagcatattagtcagggtaaagaaacagataactgaaagaatgaacatatattatgaaagagatttatttctgtggtttatttggcaggggctaaataacctaagaggggtcatctgtttgttggagagacagaactgagaaatgctcatgatacaaggttggatgcagccacagtaacaatcaggtattgactgcctggaggatccctagagagctcttcatctttaatctacttcggaaggctcaacaagctgccttcaatgtcaggaaagaataacataatcaacattaaagcactcaacagccaacagtgaacaagggaagacaaagcaatcagatttggacctcttatatcatggtcaccactacacagaaccacctaatcatgggtgggagttggtgactttgccctctttagttttcccttctataagtgctcctctgacccacccataggttattctcttagttgactggagattccatcaagttgacaatcaagcttaaccatcacacttttcagcttgtgtaggtaagttagagaaaagacatgtgaagacacaggtgcatatgggaggagagaaattacactcatttccccatgtatgtgggactgcccttctttttcctagagatggccctctttggtggggaatttagtgtgtacacagtttggatggtgcagatgtcattctcacacactataagaggctgtgtgtactggtcagtttttatcaacttgacacaatgtaggtcacctgggaagaggggaactcggttgatgaattacctccattagattggcctctggacatgtatctagggcatttgcttgataaatgattattgttggagggtcttctccattataagtaattccagccctatgcaggtagtctgggtatatgaaagaggctacatgagtgggatattgggatgatcaagccagtcagcagcattctggattctctatttaagctcctaccttgacttctctcaatgatgtactgtctctgttatgtaaaatatatattttcttcccctggcttgctttttctgtgttttatcacagtaaccaaaagcaaactatgacactgatctccttgggaagaatacttctatatagatttcttaactacaagattctgttctgatactgccatttgccaaattacaaaaattttctgagaaaacataaaactcagtgggggaaatatgtgccaatagaatatgaagaaaaagaagagtagatatggagatgcatgagatatagagatgagcataagaacagaaatgaggtcagtaagaggattagtcttgatagcattgatacaggaccctagccagtgatatgtagccttacatgaaacagtaactataaatccttctgtagacagatgtttctatcatgcccagtcccacaactgtttagacccaaataaatacacagaggcttatattaattataaattgtttggcctatatggcatagtgttcctattggctagttctttcttaattattaacctaattctgttaatttgtgcatctccatgtcatctaggcttaccagtgatgcccagccctctttcttccttggtagctacattgtgtctctctagcaactcactctctgggtccctcttccaagaattttttgtgtctggtagccctgcctatacttcctacatggctacatgctgcctgtccattgacagaaacagctttattcatcaaccaataagagaaacatatattcacagcatacagaaggacatctccattaaccttcttcctttatattactttatgctgattaatattgatattctgattgtagaaattctgcaacttcagaagacaaccatgacttatggttgccattttcataaaactgactatagctttcctcaagaatcagccacagttacaacacttgagcatgacttagaaattctgtgtgtcacattgtcatctcagaagacatattgtaaatgagtcgtatccttggactgaacctaatgtcacaatgactcctatgaattttctcctacacattctgaaaaatatgatttcctcaaggccatgttttatcatggccctttcaatgagtagagccatgactaccaatatacctgggtcacagagcccagacacaaggtcatgtgaaatttagaaacagtaattcatgagagagaagatgggtacacacacacacacacacacacacacacacacacacacacacacacacacagacagacacacaacgtgacagcattccacaatgctcacgatgttcaatcaggaacttttgtcttaaagttataatagggagcaaagatgtatacacaatatagcaagaaaggctactttgtgaaataaaatggggctctattagttgcttgtatcattattgtgaacaaatcatgacacgaggcaaagagaatttgttttggatcatagtttaagagaaggtgtgaaggaggagtacatggcagttggtcacactgaatccacagtcaggaatcagaaatggatgaatgctggcctatgctggatttctgctttttctctttttgtttagacagggattccagtacacatgatggtgatacctacatctggtctgcctctcgtcttcagttttacttttcaggctactcataagctttcctggaagtgtgtttcccaagtgactataaatttgaccaagttggcaatgaagataaaccacagcagaaaaaaattaggaagaaggattcatttccacaagacatttgctagagatctgtctgtccatcaaaacccgtgtgtgtgtgtgtgtgtgtgtgtgtgtgtgtgtgtgtgtgtgtatggtgtgtgtgtgtgtgtgtgtctgtctgtctgtctttctgtatctgcacatgcacagactgaaaacagacatagtaactatcaaatgaaggagtagaatcataaatgtcttgttaaaagggactttacaaacaaggtaagagatcattgtcagagcctgctcaataaaacactattctttacagagaataagactgagaaacaataaggttggaatcatagcacatttctcttagggtttcacaatagatacagcaacatttaaaacaataagactttctagaacagagaacaaaccatttgttattatgagaccttttccaactcattcagaacctactgaaattttgtcacattcaaacattgataattgtgtaataaatagactggggaccaaatatcttgtttattatatctcatttaattgctagactcattagaaaagcatctggaatgtttgcttcaaattatttttacattttcgtctattctttgcctgaataaaaagacttcccaaataataacatcacttctttagtcctaaatgggatatttattttatgcttctcattatgtcctaggtccaataaaagcttgaacctattttccagctttctgtttgcccactcagaatatggtgcctcttcctctaagcttacacaaaaattaaaaatctttttatattcttgttgataagggtacttttcagccctagatatccttttaggcaatatgaaaatctacctccttatgtcacaaatgagacgaatatgaacatgtgaaggaaaccaaaaataaaataattgagtcataccaaattccactgagaaatgtgctaaataggacctttgtggtagaaaagaaatcatgcatggcgaagggaacatatctggctgtttgcaggcatagaaactttttcactatttcctatcagataaaaaaaaaaaatgaagcgaatgctactagctgctgaaggttaatcaggttggctcactgctgcaccctggagacaatctggcatcttctcttcatattgcactttaaaaccagaaaagctgggaatggcattttctgtgtgtttaaacatcagcaattctccagtgccaagtctggatctcatactctttattccaacggctcttcttgcaataatgaggcaccagggcctccaaggtaattcattcctcaccataaatgtggtgaaatgtatcccacctcaaaattaacgaggaatttcatattgatttatgtgtgaatatccaatgggatttgctatgctggtaccagaggaaagacattactgaagcagggtggcataggaaaaagtcactaagacttggaggccataaccctggaccaatgtcacccactcttacgaactgtacaggtctagcaaaggcatgtttttctggaccaatcttctattcagcaaatgagaacagtaagacctaccttgcatataagattttgatttaaatgatgaactatatttaaaagactttacatagattgtgttttatgttaaatgattttatatgaattaaagcttattcttgatcttttatgacgtaaacagcaaacacagctgaaacttaagtgtaacaaccagacattttattcttttttagacatttcttgacaggctgtcagtagtttaccatactgtactatgaaagggaaataaatacataagcttcccagtccataagcagtagacaaatgcaataagcagctaatcatcagatgatcaaaaacaattcaataaatataacaatagaggtatttttctggcaagaaggaaaaatagaaaaaagtcccagatcttctcttggcagatttagctgcattatcatgtctttactgcactgctattcttgacttatctctgaattaagaaatatgaggaattaaacaaagtgaaatcggtcagacatgttagatactgataacacatggaggttaatctctttcagtgccatgacaagatgagcaggctgactcttacacttagaaagactcatctggttgtgagagctgtgagccacctgcaaactctcttgatgcaataccccagagcaatggtgatccctggtctcagctatctgactgcgacacaaggagagagaactcactatcaagcttatttgaaatttactaagcattaaaatccctcattgctagaataaagtgagcagaaggataaacaaagaaagaacaagtcactagggttatgtttcttaaggtcaggaaggaattttctcctcagatgtatctaatccatgttaggtaggatgacgtttcatgtatgtctgcaattattttccttgtaatgatgagttttatttgttttcagttgccaaatagttagtttacactataaattatgtgtctatactaatattagagaataaattagaatcttcataagatagaaattaatacataatctttcaaaagtactgtgggttactcggggtgagaaagaagtggacaaggggatagggaacacaatgaaaaaaggagagcggaaaagcccttgggaaaaatggtgaaataatgaggtcaagaaatagtatgattggtatataaaaagagaatacatatgcatctcaaaacccaaatctaatgtagaaatacttgaagattcaatttgtgttcctttggggaaagaatggctcatttgttacttaggttttgttccttaataacagtgcttaaaatatcatttattttcatagtcataagaacttcactaagtggcttctacaaacctccaattattatactaaaggtggctacataatttctactctctggttttatttgttattatggatatgcatgtatttatcagagactaaaggaatatttataaagtttaaatctatatcctccaatatccattttgttagaacaatttttaaaattttaaaacacaatatgttatattttattgaaatatttattaaatattatgtaaaatcactttctgaagtggaaaaacattaagtatattagtctacatagtatctttttgaagataaatctgtgatattatttttcacctatcttgaattgagtcataaattaagaaactcttttcccctaatttttactgtgaatgaatttttatgaaattaaaagaactgcaaaaatataatatgtacatctaccaaaaaactgagtatttcaatcaaattttgtttctacatttaccacacaagactaacttccaatgaaagtttatttaataagttaagatcaccaaaaggccactaaatatttctaacagcattttgcattatatctgggaacatttaaattccctgatagcctatgttatcagtttattatctataacacacagtgaaatacaagttaaaacttcataagtaagacacttattattttattaaatattttactcacaaaacataaatatataacttgttttatttttgttgggctttgcttttggtttatagagtagagggttaagggatttctatactagctcatgtagcccagactgatcaccttctgtagccaaggatatccttaaatttctaatactcctgtttctatatttagagtgctgagattacagatgtgtgccataccaatccttaattttaattcaaaatctgtcatgaaatcaagtagacttttgactatatcacatggctacctaaacggaggcttttctgcccttcctagttctgcaaccacttctaaaataatcactcagaggcttaatattaattacaaactgtttggtctgttgctcaggcttattactagctagctcttacaatttaattcaatccatttttattaatctatacatttgccaggtggcccatggcttaccagttctctgacatcttgtcccgtgggtggttagattgtttttgctccgactccacccttcttctgtagctctgtttggatttctatcctggctctatcctgtcttgtcataggccaaatcacatatttattaaccaatgagaataaaacatattcacaacatacagaggggttatcccacagcatggcccctttgcaccatcttaatatttataaaattcataaagagggaattataatgttttattcaattattatctgacttttagctcattttggaattgataatacagatagtctgagccatcacaagacatcaggtgagggattcatgacctgatgatcatataaaatgactctagcacaccacttagtcttttccattttcacctcttttcattcaactaatctttagatttaaattaatggaaacatttcagagttgagctgtcatttttcatttctcacccaacttgagtttaatacatttgtatttgtttgaacttgacattctttgaaagaactgtcaagtgagtgccataggaaagggttttcattgaaatttgtgtaaagttcttatgagccaagtggaaaatgtttctatgggtttgatacaggcatctgtgcaagcccagtgcagtaataatttaaataatctgcattcatccaaagttcaaattcttagacaagtacataaaaaatgctctaagccttgaactgcaagaaaagagcccttcacttgtgtgtctttatgatctgtgacattgtatctgagtacaccacagggaagggttaaaagtcaaaggagaaaaaatgcattactataactgtaattgaacaatgtcactctccttggttcatttattcttaaatagagtccctgaaaatccagaaaagtaaactgttacatgagatttttttaatcaggaaggttgagttggggaaaggacagagagggagatgaaggaaagaaataaccttgttagaagtagccattatggggttaatgagaaactgggcactagggaaatttccagtaaaccacaaggatgacctcaacaaagaacctaagcaatagtagagcggctaacttaaatgtccttcccctataatcagattgatgactatcttatatgccatcctagagccttcatccagtaaaggatggaagcagatgcagtgcttcacagctaagccctgagccaaactcctggagtccagttgtagagaggaaggatcaataatgtgagcaaagaggtcaagaccatgctggaacatgcaggaacagctgacctgaacaaatgggagctcactaactagacttaactaggccccctgaatgtgggtgacagttgggagacttgagcagtttatggggccactggaagtgggaccagtatttattcctagtgtatgggctctttggagccaattctctatggtgggataccttgctcagcctagatacaggggcaaggacttggtcctgtcccaaataatgtgacagacagagaatcaattgataattcaccatgggagacctcaccctctctgaggagtagatacggggtgggatggagagatggtagcggagtaggagaacaggagggagagggaactgggattggtatgtaaaatattagttttaaaaataaaaaatgttgcagggcattggtggcacacaccattaatcccagcactggaggcagaggcagaggcagaggcagaggcagaggcagaggcagaggcggcaggcagatctctgtgagtttgaggtgagtgtgttctccagagcaagtgccaggataggctccaacgctacacagagaaaccctgtctcaaaaacaaacaaacaaacaaacaaacaaataaataaataaataaataaaatttaaaaatgccttttatgcttaacattgatcactcatagaatatgttacctggcacttttgttcccagtatttttccttgaaaatattgtagaaaaaaaagagtgattcttccaatcatcttttcctttttcttttaaaagtgaaattattttcactttctaacatttataaggccccattttgcaaatttcactatgagctacctctagttattcaaaatacatatgcaattgattacatcagaagcaatttagtctaatcagtgcttaatgggttaactccacttctagcatgttcagcatcaccatgcttctaaaaaactataacaaagcttgtactgtgaccatgtggagccatgtacacaacatggccaatgtctaatgccatttgactccaatatggacagaggactgtatagatagaagaaatctgtcaattatcatattctttcaaatcttattttctattatttatgccctagattacctgcgtttaaatcttgagtttaaatagtcttgaaattaaatatctcctaaaacaaggaaatagaacaaacctcaaaacagaatggaaagcagccatttctggatttatgtgaaagcatacgggaagtggatgggaaatagctaggaccagtgccaaacaagataaaatatttacttgctggtgttgtgggacagcgggaaagatttgaagtgctcccagaaatcaccttttcctgcagccttacagggccttgtgcatacagtttctattttatataaaataaaatttgcatgaattttgtaagaaattctaatgtagggccagaaattataaagtaatagagtaaaaatacctggaactgaaccatgctataaggaagactgtgaaaattcaggaacacacacacacacacacacacacacacacacacacacacacacacacacacacacaaatcacttactgcatatggagtatttgtaaaagctgatgacattactattaattcatcgtgatagaaacaaaatgtaaacattatgtgagaaaccaaaatattgacagaagcaggcagatgttgtaacctcttgagatatatactaaacagacttgtaacacatcattctacagaagcagagaccttaagatgttattgtgttttatcatggcatgcccggtcttctctacatgctaactgaagatttagtcataggaagagcaactatggtgacagatgaagtgtttcctttctgcttcgcaaactactaaacgggtgatttttacttttactcatctgaatattttaacatttagagctttgcataaaatgtcatttgttatatcactatacttgacaaactgctacatactgaaattattccaccattatcttttaagatttttatctctaatgaagcagtgcatattgccttcaccacagattaacaaagctaccattaacaatagtgctcaattaatagttaaaatttcaatttgtctcatatttgaaatccgagtggttccttcttaaatattaataacattaagtacattgtaatagcttctatggaaacgaaaaaggggtgttagctattgtaagtttatattgtactactaaagaaactcagattttcaaatgaaaccctctgttatgcatttataagaaagatctacaattctaaaagcagaactttgatgaatgaagttggaataagaaataaagtttttaaaaatcttttttcacttctctaatttagaacacagacaagattcatactcattctaaaccttataagtgattacttcttcatatttaccaaaggaatataaccctacactcagatacatggccaattgacccaacaaaatggagtgaagcagatgtaatattttctggttcatattcttacagaattttcatgacaaaatgcagccatgtcctctccaaaagctggaaggaactacactgcagatatagtcacaagtgtgtgtgtgtaagcatttgtgtgggcctgtgtgtctgtatgtctctctctctctctctctctctctctctatatatatatatattatgtatgtgttcatgtgtgtgtggtgtgtctgtgtttgtatgtgtttgtgtgagtgtgtgtctgtgtgtatatgaatatgtatgtgagtctctgtgtgtgtgtgtgtgtgtatgtgtgtatgccacaggtgttcagtgtctgtggaggacagaaaaaagaaaggagtttcctggagcttgagttttaagtgattgtgtgctgcccaggtaggtactggaaagcaaactctgtagctcctgaaaagtaacaagtgctctgaacaactgagccatctctccagcaccaagatgagccttcttcataagcataattgttataattatttgtgtcataaaataataattttaagctcattgtcattacaaacagattacaccaccttctctaatcaagatagaatggaagtctaagtgaggatttttgatagtgtagcttttttgatagtgtagctacctaaaagttgtgaagcctcaagaaaagttgaaaatgtgattgcgagccaatcaaacaattaagagtgcttgctgttatttcaaaaaccagaatttggtgtctagcagcaatgtctaatggctttcagcaccctacaatgccagccccaggaatctgacatctgattccatcctcagtgaatacctgcctaggcatgcacatattcacattcatagaaaaataaataaatcaaaataagtcttttgaaaagaatttaataacaaagatataatttcttatctgctttcctatcaagactttcttttataaaggtcattttttaaagactgtgaacacagtagtcattaggctccgagagttggtgcaagactctcatcctgctgctactttctgatatggctttgttgccaagcaccgagtttcaggttttgatagaatgtgtcagaaagacatgatctgtcagcatgtctcattcctccccactgattaatgtcgaagataaaatgaatgtttaaagccataggattctgaaagcccaaaagtgagcaagcctccaaaagggcaaagcagccttcaactgtgtttgaaattttctccccctctgcttgccttccatgttgtgagatgtgcctctttttcactaaactttcataattcacctctatttcaatagctctttttttgttttgttttgttttcatttgcaggattttttcctctccaacatctgctttttatttgctctttatctccaaataatagctttcttcaaacggcatgtgtggttgccagtagcaggagcctattctagaggtaatgtgtcataaatggccatgtagaacacaaaatgtctgtgcacatcctatgtgctgactgctaaacctgagcctacccctttgaaactgactgcaaaatatatccaaacatcatttttccattgaatatttagtggagatgtcccgtatctattgtgtttaattttagaatcttaggttaacatggaggtgaacaacctcaaaaagacctgctgtgtgggagtccctggtgatctgaaagaggcaagaagaaaatgctgttcaacacgacttagttaactagactagttcacaattctagagtctgacacttagaggtttatttttgacatttttaaaaattatatatttaatttcattcaacatatttaagcacagtacactttgacaaagtttcctcttgacaattctcatcacaaaacttatggtgtggccacacagaaactttcagatcctattcttattaataatctcttttttaagttttttttaagttgcaaaagacaaaatgcatgacttttgcaaagtacctgtgaccttttccacaaaaatggcttctatttactgagacacaatgttcactataaagagctaggaaggaagggtctggaataagcgtaatagtagaatcttgcaaaattcatggacatctttcataagaatggattctattgactggggaacaatgctcaagagtctgagagatttgggtgaagcctggctctacagatatcaaaagatcacagggttaaagtttgttataccatggtttaaatatgaaatacccctcacaggcttacatgttgaatacttggtccatctggtgaaatcatcttgggagatacaaatctttaggaggtaagaagtaactaaatgaagtgggtcactaggaaaagagcctttggatttacagtccagtcctacttctgattcaattgctttcttcttaccagtgcactgaaatgcaaaatgtcatatggcaggcttttctcactatcccaccccaccaggatgtactgtatcacctcaaactgtaacccaagataatccttgcttttctgagcggtttcttgctgggtatttgtttggctatgaaaagtgtaactaatacattgtgcctttggttctattcaggcagagtaaaagcaatggatgagaagatacttggcatttacatatcatattactttcagttccaagacaaaggagcttaccaccatacaaaaccacatggaagagtatgggactcagtcagatgttgtaagtgagcctaggtaaagcataaggctagtatgaagatttttcatggacaagtatagcacagatcatctggtaggcacagtaactaaggagtagagagtttgaataatttaatttcagcaaataatttgcctctggactttataagcaacataacagctcctgggtgtctagttcctaaccagcagttgagttgcagtaaagaaattactgggttaagttatgagagtttgataaaggaagtggctagaagtatgatctctagattcagtgatctgcacatcataccaaagctgccttctcatacacacattacttgttctatttaggaattaactgcccttgtgaggctagattttctctagttactcatggttccaaaatcatcaagcattatttaatatagaaaacaaaaagaaaacataatccctgtagaggatccacctcagtgttctagccatctgggcctttcagtaaggaaaggttgctcactgatctttaagacattcttgctgtctcagcatagacacatgggggagggcctaggccctacttcaaatgatgtaacagactttgaagatcccccatggaaggcctcaccctccctggcgagcaaaaagggaatgggatagggggtccgtggtgggtagaggaggaggggagggagagggaactgggattggcatgtaaaataacatgtttctaaattaaattttaaaatgtgaatgacaaataaaagtattctgttatatacttctcagtctcagagtgagaggggctatgtgaacaagttctcctgaatggattagatggtcaccactcaggatttaaagtctaaaatttctcaaacgaaactgcattatgttcttcatggactaagtgctgatggatgtaacaggccatgtgggagatccagaacccagccagcaactgaatggaacataggtgattcagccacattaacttcctctttgctgctgctatcttaacctctttaaatatatttatacagatgtgtttagaaaatgttgggccttttctaatccacagttcattttcatcttagaccctcacaatcatgattatataagatattttgtatacagtgctcacaacacttctaaaatctcaattctcttactgctgtacccttctaataagccagccctttaggcacagctaaccatactcttgatgatcactgtagtggtaaacctattctttattcaatttcttccttaactagcttaattacaccgtaaattattaaaatatttccattgattctctcaattccattgacttcattgactcattttagttgctcaacaatatctcaacctctaataaatctgttagtccctagtccagtcaccaagtatgcttctcttctgaatgtggtagaaaacacatgcaagtgctaatgtcatttcaaattaacagtcctgatctggaaaccatcactctggtgtcattccacaatctggaagaacaactctaaccactctcctaccctctcaaaaaacatttcatcccattcctcttcttgatttctcaaaacctgtccccattgtcattgctagttgacagttttgcttgcgagtttgtttccaaacattcttagttacacatctatttaaccttctgcttgtctggcactctgtgctctgctttccctcataatattatgggtgaaccagattcttccatgaggttaccactgccacttgtgactttcattctatcctctcccctagttaaagtcatatgtaagtgagtgcatacatgtgtgcactcctgcatgcacacacagacacttttccccactctcctacatcattggttctgtcctatgcaatgagtaatttccatcatcatatagctcattataatttctgttcctctacccagcaagtcccacatctggttccagtgcttctctatttaattatgtatttttatggtctcatccattttggcagttgttttttaaagctcgtgctacttagacttttctttgttgcattctttcagtattttaattgttcatggtagtcaaccatttttattctcttcattcaattattaaatatatgtttattaaaatttgttttctttctattttctaaattttgtctattttctaaactttttcattctattttctaaattttgtcactcttgtttttcctacgtaactgactcatggattttttttattctgcttatttttcttactctgttcttaaggataatgcaatttctttcatcatctctttagtgctgttctattgatcagtgtcctcctcaggtgtcccaggcccaccctgccttggactatatgctcttccctaaacctaagtggctcctttccccacactccagtggcttattttttaacccattcttggtctttactcacacactcccattccataaatagtccagatggcattttttaaatcatagtatttagccaggcgatggtggtgcacacctttaatcccagcacttgggaggcataggcaggtggatctctgtgagttcgaggccagcctggtctccagagtgagtgccaggataggctacacagataaactctgtctcaaaaacaaaacaaaaaaatcataggtatttaaattatcacctaacctctccatactgtttatctacatagtttttttaaacctacaaaaagttaggcacagttatttacttcagtgaataattttatttcaagacaccctcttttctacttctcaggcactccacctgaacctagcctctttgaggataaaggcttcactaaatgctgccctctgaagactctccaaagtctagtgttccatctcatggtatcatttaagtatttcctccctctaaaatgaatttgtagtttgtctctaaaataagaggcagggcctttattaagtgagtaagtcaggatggttctaatttcaggaatggattaacatgactattataagaatagcttactgaaaatgggaactcttgcaaagacagtctttcttcatcacatgttttcacctcgtatcttgtctttcattcaccaggagatgcaaggtcttcagcaaatgctagtcacaaattgccatgctctgttcaaacaatctaaccatcataactatgaaaaataagtttcttttctgtaccatttaggtacttttctagagtagcaaaatcaagactgagacacttgacatactgtgtgtgctcaattcacatgtattgaatacatgaatacaaaacaagagaggtaaccaggaaaaaagcacacttcccccctttggatattgagagatcctccctgtatcttccaaatgatttttttttattgtgcaataaatctccaagcattaacatctcattatgaatttaaatcattccatctctgttgctatggcattttatcttaaattcatagtgttacctacaaatgttaaatgtgccatcctaaacaaatacacgagcatagaatatcaacacctcttctgtctgtcccaaaagtctcctctcattttgtacctctctgacaaaaatggcattttgtatggaccaagtgaaaaagaacttgggtggctttgcagtatttaaagccagttctattcacacagtttcaccactgaaggataacactggccaggcttatagctagcgattactcacttggctgctttcgacttctcactaagccacataaaaatgccacctgctactcacttgattgaagacagactgatgtgagcatctagtaaagaaggcaggaaaataacacagcaattgtgattcatgtgttcacattaatttttattctttcttctgccctttcctacctatctcagtcacacctttctctctacagctgatgtttgctctaatatcgagcccattatcttattgtattttttgatttcactctggactatttgttctcaaaatatacctatctattcaattggttttttacagaaatgattattgatatcaaagtcacatcagagattttcaatgaggtacagcatattccctcagcagtctaaagaatagatttataatgccattgtagagtatctttcaaataccctggcccattaagtggcaattgatgcttaactaatgtgctttctcttgaagggcctatcttttcacagcactggatagcaatatgcaggagatggatatgtggtgggtgaaagttcaacctgagatttctatataggagaaaggctgatgcaagttcaaaaggaattttatattctgataaaattacatctgaggcagtagatatggtttaatcacatgtaattcttatcgttctagagtcaacctcttatttcctttgctatgtttaatttaacacaaagaaaaataccattaaaatttatatctaaagacttatgtagtgcacatatcttttcatattacctgaagaatatttttaatacttacaccatttttcaatttttgtctcttacaattcatatttctttcttttttattcttagcttcaattattttgcttttttaaattaaaaatacaatttttcctcacatcatatatcctgattacatttccccttcttctattcctcccagttcctgcccaactccccttccatctggatccactatcttgccatctctttttagaaaatgaacaggcttctgagatataaaaatataatgtaataaaatacaatataatatgacaaaaactaacatatttgaattggacaaaacaaacagaagaaggaaaagaaaccacgagaagtcacaagattcacagacccacttgttctcagagtcaggagtcctataaaaacaataaattagaagccataacacacacacacacacacacacacacacacacacacacacaaatgaaggtaggataccatcatagatcaaagggcttgtggcgtggtcagtgtttgtttctcttttggtagaatgtcaacaaccttactgtacccaaaacactacaacatggggatgaaggctctatgtaagcaccatcttgacttccccatgttcagtgaattgtgttagtgctctattaagcaatgggaccttgctatgagtctgggaagagcagcttatagtcttgtcaacagcctctgttcggggattgccatggaacccctttggtcaacaactcaaaaagatgtagttcagtcctgggactaaaagcttaatttaatgataagaaatggccaatttttgctctgtctctccatttttgtctttataaatttcatgaagatttgtgtgtgtgtgtgtgtgtgtgtgtgtgtgtaatttgacttctgtactaccccttaaatgccttttattttaactgtctttccctgtattccctttcttggtgcctcctaaacttcccttccccatttgatgctcccattccagtggcccacacttccatccataaccatctaattgagttttctttccaaataaaatctatctaacccactaaaccctctgtggttctacatattgtagtttgtttatcattgacgtaataaatatggatatataagagaatacacgtcttatttgtcattctgccctggtttgctttacttgggatggattgtttgtttgtaccagtctttttatttttaggaggctaccaatcagctttccaatgaaaacatagagagttagtagttatgaatgcttggtcttatattgtgcttgtttcttgctagctctttaaacttaaccggtttctgtttatctacattctgccttggggcttcttatcttttctatttgcactccttactttattgctgactctatgtttggctgactttttttttattctttatgtactactcatatttacatatccattcccccattcccttgccctcccatcctcccatgttccccaccaagtcccccaaatccaccccccaactccccaccagggatagtgaggccctccacgggggacctttaaagttggtcatatcatttaagggaggacttaggtcctccttgctgtgtctgtgctgcaatagtatccctccatagggaatgggctcccaaagaccatttgtgctctaggcataaagactcgctccactgttagagttcccatagactgtcttggcctcctagatggcacccacattcagaggaattggtttggtccaatgctgtttccctagctttatgactaggctatcagtaggtcatgtccactgtttctgtgggtgtatccagcctcatcttggctcctttgatgatccctcctccttctccacaactggattccagtagtatagttcaatgcttagctaagggtgcctgtttctgcttggaacagctactggatgaaggctctaggaatggtaaccaaggtaggcatcaatctcattatgggggaagggcatcaatggtatcctctccaccactgtctggcttcttagctggggtcatccctgtgaatctcctaacattttccttatgccagacctctctccgaacctgtactgtctccctctatcaagtcgtctcctttcttgccctcctctattcctcccctgtctcagtcctcttgttgtccttcttgggaaaaggtattcaccaaccccacagctgacagagggctgatcaccaaaatatacgaagaactcaagaagctaaccaccaaaacaccaaacaatgcaattaaaaattggagtgcagaactaaatagagaattctcaacagaggaatccaaaatggctgaaagatacttgagaaagtgctcaacatccttggccataagggaaatgcaactcataaccactctgagatacaatcttactcatgtcagaatggttaaaatcaataacaccaatgacaatctatgctggagaggatgtggagaaagaggaactctcctccattgttggtggaagtgtaaacttgtacaaccactttggaaatcagtatgttggtctctcaggaaaatgggaatcagtcaatctcaatatccagcaaatcctctcttgggcatatacccaaagaatgcacactcatataataaggacatatgttcaaccatgttcatagcagcattatttgtaatagccagaacctggaagcaacctagatgcccctcaactgaagaatagagaaaatgtggtacatttacacaatggaatactactcattggaaaaaagcaatggaatcttgaaacccacaggcaaatggatggaactagaagaaaacatcctgagtgaggtaacccaatcacaaaaagttaaacatgatatgtactcactaatattttatttttagacatagagcaaaggattcccagtttacaatccacactgccagaggagctgggaaataagaaggataccaagagaagattgcatagtccctcgaagaaggggatgaggacaaggacccttgaccaaagtgggaatgggtgggagggaaaggaaggaggtgggaaagaaagaaggggagggggaggagaacaagagaatgaacacttcttatccatttgagttttgtctttggagaattctctgttgacatctgtaccccgtaccttatttgggtttatctattttcttgatatttaggtttcttccattctttgaatattttggatattagcactttatcaaacttatagttagtgaaactctttttcaattctgtaggctgttgctttgtccaaatgacagtatcctttgccattcagaaacttctctgtttcatgaggtttcctttattaattgttgatcttaatgtttatattaatgatcagaaagtcttctcctgtgccagtgaattcaaggctatcccacactttttcttctatcttgtacagttttatgataatttcttttaattgagtttagttcaaggtggtatatttgtatctatttgcattcttctacatgaaaccatccagtttgatcaacaccatttgttaatgatgctggcatttttccagtgtgtgtttatggcctctttatcaaaaccaattgtccatatgggtctgggtctttaattctactgctcaccttatctgtctttgtgtcagtaacatgaggttttgatactatagctctatagtgcaacttacccagggatgatgatacctctcacagttattttagtattctggattatttttagctatcctgaagttttgggattgttttatattctcatatggtactgaaaatgtctgtttaagaaatgaactggaattttgatagggattctattgaatatgtttattgttttcactaagatggtcatttatattatttcataactttattttatcccagaatttagtggaattgctttgaatttttctacatataagttgatgttggctatggccttgctataaactacctttgttatattgaggtatgtctcttatatccctaatctcttcatgacttttatcttgaagggtgttaggttttgttcaagatcttttctgcatctaatgagatgatgattatgtggtttttgtctttagtttgcctttatggtagattacatttactgatttacgtatgttgagcaatccctgtatcactgggataaaacctacctgatcatggttgatgatctttttgatgtgtttttgagtttgtttgtaagcattttatttaaaagttttgtatctgtatttataagcgaaattgatcagtaatccccattctttgttttttttaattttccaagagtcattttttactgtataaatgaaacagaatatttaccattttaaagcatataatattgtatattgtggtatgtttgtgtttgtgtgtgtgtgtgtgtgtgtgtgtgtattgaaatactatacagattcacaaagaaaaccatctagtaatatatattaagaaatgtacatgtagaaaaggtacacataaagaaaagggaacaaataaagatgaatgtgtctaggctgagagagcatccctctatggggaatgagctcccaaagtccatttgtatactagggataaatactgatccactaccagaggttccatagattgtccaggcctcctgacacccacattcagggggtctgggttggccctatgctggtttctcggctatcagtctgggacccgtgagctccccattattcatgtcagctgtttttctgggtttctccagtctggtcttgaccactttgctcatcattccttcctctctgcaactggattccaggatttcagcccagtgtttagctatcagtgatgactgcttcatttcagtaggggctatatgtctatttaaattgattatctgtttttgatattaacttttggtaaatgaaaattcttttaggatcctgataggtgtggacttccttgattccatgtaaaatgtgtttctaggtatagagagctgatgcttaggaatggggataggctattgggggtgctaaggttgtctacaggactaaagaaattagagtaccccaccaggatctgcttagtttccaggaatttgggcagatagtgatgaaatgcagcaccaggtggtcttctgcagagccagggatgagagtgggtgattggatttggagaggaagaagaagtgaacatctgcatttaggcttcctgcttctctggccaggattccctgctatttcccaagaaatgtctgctagggtagagactggaataaaacaatgaattgggaaaggtaagtttggatggaaagatctgtttgataaactgcaaatgagagcacagaggaagagtcggctacagcatatggtctgctataagcctggggatgaggctgggggttggacttagaagatccaaagtagaggagaagatctgcttttaatgtcccagcttccttggtatgctacccagagaaatttggttttgttcatttaccactcttagcatggtaccagataaatatatgagattaatagtgattattattgtttcttcaatacttctttaatttaaatgcttaaaacttcattaagcaagtcacacatatattcttaacctcataaaaattcatatatttaaatgctatatatctgcttataaatatgtctgcatgtatttataagcatatataccatctttgccataaaatagtatgtatatctgtgtgtgcatgtacatatatgtacatgaataaatattattaagcatacacatagaataatttttgtaggtacaaattacatattattataaaaacaactaagatctaattctggtatttatatatttaaataaattgtttccttattcatatgtggtatatgtgtatctgggtatggatatggccacaggaatgcagtgccatggtagtccaggggcgcttttttctcctggagctgaagttacaagtggttgtaagccacctgatatgggttctgagaactgaactaagatcctctgcaagttcagtacatgctgttaacttgctgagtcatctctccatcctgtgagtgctgaattttaacaataaaactacttggagaaaacaagtcaaacctaaactctgcatgagcacttcatgttgtatttacaactcattatgtcataattttactaaatataaatataatttttaatcaatatacatatgccagggacatatttaattcttcttcattgaaaataattgaatcaaaaggtactgtctctaccatagaaagagatcattttttttcttgactagtgggtcaaagtaaagttttgaaaagcaagtctgcattaaaaattctgcataagctgataggataaaatatttctagcaccaaattacttgagccttcttaggctcctaacggaccctttatagctctcttctacatattctataacatctctgtgatggccaagaacatcctttgttgtataccaatagatctcttgcttccaccaaccaaaaaactaagataatattagagactttagctgagagttcatctacttttctgtaacccacctgccttaactaaatagtgtcttcagttacaactttctaagttatgttgcttctatataaaaacatgaaatgatttctactttgtaacatgtaattgaatctgtgattctgagccatgtatttggctcaagaataatctatcccttgtcttctctgaagtaagaaatattcttttcatgttgataacactatgctatgttagttacccaccacttatttacataataacatcaatattacttttaagtggacaagtgcataaaacccatataaatatgtagtcattggagtctgtcaatctgttagtaaagattgaaacacaatgaatatccaaggagttgaatgtttactaaaggagataagccatgaaataaaaacagatggcccaatagttctttgtttgggaaagcagagttagccacatgacctgtatgaaaatttaccctcactgagataaagtgattaatcaaatctaatcccaagcttcatttaagaatcactttcttttaagctgtctgtaagggaaaaaaaatcaagggtcaaattctccttatgtatcctaaaattaagtattttttagctctaaacttctacctcatactactactacttgtgagtaactgagagattcagaatccacctccaagagagactagaatccattcttgtgctgagtatatggtagaagattatctctcttctgatactgagcaatacctttcacctccaccatatactggggcatcattgcttctgatcaaaagtctattttgtgacaagcaaatggccttaggtacaggtgttaaggtccatttctgaagttggtattgcatagtttcatgctaaaagttgtttcaaagggtattattccattttggaatatgtgtgaatcagttccttggtaacagttttcttgagaaaatcatcagagactcaatttgtgtagtgtactgaagacatgcttaacgcacaataaacatttgctgacaaagagtgaactaacattactctataacttccatatcctgataatgttatcaatatctatattttgctgaaaaccacaagatacctattaatttagtcagccttacacttataacatgagttcctactatacgctaattatttttaaattgtcttacagtacaagggagagaccctgacatttaattcaattatatttccaagaataatagcagtcaacaaacaaaacccatacagaataacagagaagtatgactggtccttgagagtaaagcaatgtggcctgttaaacagataagacagaatgaggttttgcagtgtctatttgtaacccttcttagtatgttatcagatttaggacatagatttccattttttttaatcatgaaattacaatatttacttcagagtactgcagtgagagtaatcaaagcaatgtatgttcagttacttaatatattgctgagaacaggataggttctcaacaaccattcacgtgttgattttacttctgctttatcagtaatactattactactttgtcttattgtgaataatttagaatttgtcctctttcttcaggagttatgagccagtctgtctctgttgttacccttcccaaatcagtggtcagcagtttcagttagataattcttcatgttataaatggagtcatttatcaaaactaaccaaacgtcctcctcaggcacaagacaaaaccatctagaatattctcttcccactgaaatgtgcactcgtgtggtgacacagaaatcagtatagcaggaactaatgatctgattccattaacaattgctcatttgggtggtaagtgacctgagacgaaggaaatgcaattttccctgccaatacagtaaaaaaaaatggctgtcattacagttctaaaaagattataatcaatgatactttttattggctcaattgaactacattgtggccaattaaatccttgttttgatgacattgtgcaaaatgagagagttaagcagttttttttcttcttttgtcttgcaaaacactaagaacacaacagctttagccttaatctctttcaaaggccagaggtaactttgttgtttgcctgatgtgtccttgaccatggaattgttttatctgcatgaaaagcatcattaaataccatttgcattctcaaaggcacagatggtcatcctccagtcaactcctaagacttttccctattgtttcttaaaataaataaacaaataaataaataaataaatgtattagaattgtgcttaatgcgaaattggtaattttaaattcttatttttatttgtgttcatgtattatatatatgtgagcctcacaggtgtgtacaagtatcttagaggataggaaagggaggcggttccactggagctggagttataggtggctttgaggcattcaatgtagatgctgagaaccgaactcaggtcctctggaagagcagcaattggtctccagtcccaaagaatttaggagtttcaactgaggttttgatctcttaagtattgtacaataacatttaagatctttaaaatgagcacactccctttttgtccagggagatacagcattgaatatccacatgctatgcttttccaggtctttttgtgaaatcatcacagtacacatatttgtgatccttagccttgtgtgggagcactttcccaagcagttgcaacctggtagttgctaggtttcatatgaatgacatttatatttctgaaagacatgtacccctgtatcctataaatataagtgataccatgcaattcaaattgatggtagtctatagactttggtattataaaaagatgatgtaagagtatgtgaagaacacctgtcactaagtcagatgtctaaattattttcttatccctaacatccaaggaacaaacatagaaaatcctgagatttttttctggttatttacttaaatgtatttttgtttcaggcattactgatcacttaatctatggcaggaactgtgttaaaagctaaatgtgcaaagattaaaagcatatgattatccctctcaatattttttaaagccctggcattttataaaaaattaggctaattttacttttgattagatgtcgctgaagagggttaggtatgctacttggcaaaaagtagactgggttttctgtgtagctgtagtaattctatcaataatgtgaacacagtagttattataataagtataactgattcttgctttctaggaagatattgggcctatttgggtgtcagttataaggatcatattgaatcaaagtagaaaactgtcattgtacatggaataaatagaaatatatgaattaagaagggtgatgcttttagaagtccttctgtctcatgaggaggcttataattttaagtgacttttactacttccttcaaatcagaaggaccagggaaagtatatcacatggtgttattattacaatttggtggctcatttgattaagttgccacctagagtaaaaagctacattaaaaacaaaagtttgctaaaatagcaatgagtaaaaccttaccaccccaaaaagcattgaaacctttacttccatgtaataccctaaattagaaataagttcaacaagcagccaactctgcaattcaagatgccttggctacagaggaaaatagatcacaaataaggcaatgcttgtagataagaggtggcatgtgcttaactcctccacaacatacaagaaagcatttaaacttcagttcttacaggactttccccatgttttctccgacagatatgaatcttatacccaatttagctatttattttccttttattcctgattttcttttaaatttctatcccatcttgaaattgttccttgttttctgcattctttgcatagttgccaaatccaggagaactaaccctttctttgtttattatttccttgttggaccacctcatgtgaagtaagtacttggagagcacacatacaaattcataaatgcatcatcctgacattactgtgttgggttttgggaatagtggagtttgtattgatgggtattttcctccctgctattttcaaaatcattattttttgtacacaatggcataggctatatctacaagcatgtctgtatttacacatttctatatgtgcatgtgactatagagtaataaaagatagcctgggaaagtggttcaatcaataaaaatcttgccatggaattaggaagaccagattctactcaccagcacccccaaaaccccaaaatagcactagggccagacataggcagccaagtcctaacatttgttgttaaactagtctagtgaactgctgagtttcaggttcagtgagaacacttgcaacaataaacaaaagggcagagagtctaaaaatgatacctgatgctgttttctgacttccacttgtgtaccacacacacacacacacacacacacagagagagagagagagagagagagagagagagagagagagaggaatgaatgggtgtgacaaggatctcagctgtctgacagcaggctatgacattcattcaaacatacgatgtacatttactagttaagtgtcacatgtaatgtgtgcttattgacatcctggctctggaagtagtattgctttctccctgtttcagatcaaagtatgtttgtaccaaagtgtcctccaaagtctggaaaaagaatggccctctgactctgtgacagggacagaagacaagtgtgtcttcaaaaccagtggttcctattatgtgtcccataatagaaagtgcaagctgtgagagtttaatctcagaaattcagacaaggaaagcccagccatggacagaaagctcacatggcaactccaactgactgattcagtttcccagtggatttcagctgaatattttaagtgtgtagtttgatgatgttatctgtatctgttgttatttgttcttttacttaaaccgtcactcaaggaaaggggagtctattagggatgctagctggctgccttaaaggggccttactcagtccccttctgctgggtgttttgagcacctgatgtgatgttttgtcatctctctaagtagctaccacttggtatttattctttcttctttgaccagctatatgagcagtaaatatactcattccaaaccaaaagtacatctgttatagatccttcttgaggccatcgagaacaatacaatatgctctcaagatcagttttctggcaatgttaattctaggaaatggggaaaattaacagaaaactctagtgtatttttggcacacatttttgaccaccaagcaaaacttgaaactttcaaggtcaaattgaaactgaaactgaccaaatggctgttagataaatgaatgtggtattctagtattttggatagcaaagtcttacaaattcacctggatgaaagaaaagattagtttatcaacacatattcaaaagtagacacaccgcattagatagcattttttatacaagcaacttgtgattcacatcgcactacagattgtgttacagaatttggctgtgtagataaagcacagttttcttcctttattctttcagtaaatactcaagtgcttgctgagggacaaatgccatgtttttggcatagttccaccctttgtaaggctgacaatcaaatcacaaacacaacagaaaacaataagaaacagatacagtgccatattcctaggaggaggacaatgtagcatggtatatgatagaacagatgacatggcactgagcaggtatcattaaaagggaaggccacatggaaacttggaagtgagaaggaatcagtataaaaagtgcagagaagacaagttctagctaggaatagcacaggttcctatctgatgtttccaggagatcatgcaaagatctcctatgctcctaaaacacacaaagggaataaagaacacaaaaagatgtagtgtaaatacagctttatagaaaattaaggaacacttaagttgcttaacacttaaaggttttcaaatagacaaaatagacttttcttttgttcacttataaagtgaaaagcaaagaaaaatcagagggtggagaatctgcctgtggtggcagaacaatagaccatacacactgacagactgagaaagctaaacatttgtttctatccccccccaaaaaaatctatgttcagagtggaaaggcaaggtaagctgaacccacatgagtgcaagtactttagggagcctgttggattcaaaagtgtacattctagtccctgggcacatctgtgctcctgtcactgtcactaggattcatcagagcaagagtttcagtgtgggtgacttctcattaaaaactgtcccttggcagacacccactcagcatcactaatcagctctccatccagagggactttctatttctgtcttttgctccattaactaggagtcctggcagggtggaggttgaaaagtagattcaagtaatttcaatatgatactgctagatattatcttgaaaaaagggggtcttctttggtattgttttgttttgattttgagtaaacgttgctacttttgtagttcatcagtacacacaaatcagtgacagcatccacactttgtgggtgatctcacagagtcttgagaatttccagaaagcagccttgcatcacatcactgcagaacacattatccctagacagagaatggagcactcagagtcaacttttctcctccctgtgagcccctgggtcagtcacttagtcaatttctttacattttcaattgtttaattaccacaattcaagaactattttattctaaaatttaaacttgtttgaaagataggctcccaaatgcctttggggaaatttatgggtaagcataggcaacaatttatctttcactaataccttagcaggaaaaagtctaaatttaagaaattgagcaatttagctgaatggtggtgacatatgactttagttccagcacttgggaggcagaggtaggcagatctctgtgagttcaaggccagtctggtctacagagcaatgtgtcaggacagactccaaagctacacagagaaatcctgtctggaaaaaccaccaataacaacaacaaaaagaaatggaacagcttattacaagttcttaggacaactttgccccaaaagatactacattttctgtttgtttctggaaggttaaaggtctccaacctacctgtgggagaaaaattacctctctttcacctgaggcctgactttctcttacaagtgttagggatctgaactcaggtctacacagcattttcctttagctcagaggacttctgatatgatttcttttaggtaaagtatgaagttcacccaactgtttctcattcatacctctgccctgagagtgttcaggatttagaagtgtgtgttgaccttttccccttcttgatatatttaagattccctatttacacatggtggcctacattgattaaggcaaagtgttcattgtcatatttatatctcattattcagggcatttatgtgtatgtccatttcacttatttgttcttcctagtgtcttcaaagacaatcatctccaaaactctttcctgtggaacatgtgtgttcatggcttatgaagtttcttgtaccagtgtgtttgtaagttttatcaaatttggagatgttagagccattgcttttataaataatcttctgaagccagattctctattccaggcttctaatggtacatacactagaccaaccttgtttacagctccactcatttttccagtactttttctttttttatgatttcagtcctatatattcccagttataaatctgactatataacttagaaagataaatttagtacactattcatagaactaagtgtatattacaatatattttattcaatacataatattttacctgaattctgagttcagctttatggtttcatactctcttcaaaaaaggaaagaaaagacaaactgcaaatttgctcaaatctgttgagactcagagctctttcaccttcttccctgtaggatttatctgcctcatgcagcaatgtattaagcactgtaccctttgatccagtaaggactgatctggcatcatttgtgattagaagaacaaaaataactgcatttaaataactttaagactcatagatgtttagaaaatgcatacaaaaacaatagaacatagcatgttctatgtcattatgctataggaaagtaggaaattttgaaaaccaatcattaaaacaaagctttgtatcacaacagtctataggaatcagttatataataaaaacttactacttttcacgaattgaggagttatacacaataagaggattaaagccagcttactgggagatggcttcttttagttttaaagaagggtaaaatctcagcaacataaccacctattccatttttgtactgttctaataaaactattatctaaaataagttatcctgttgacaatgatatttaagaaaaatctgaactatttcagcaaaataataaatcatttaggaatcagattgttctttcactttctatctcagctcagacccagggacttattcttcctcttagataataaggaaggaatcatgtgtgtctgtcagtagaggggagtgagaccacgggtccttcagtcagtatatctggatgtaaacagagaagtcattgtactcccaggaatgctgcactcaactgataaagctatgtcacacactcctcttgaggaacatgaagaaatggtagagttttatttattgtttgtttgttttgcttaattttgtttttgagacagagtttttctatatagccctggatgtcctggaacttgctgtgtaaatcatgctgaacttgaactcacagagtttcacctgcctgtgcctccaggaaataaaggctgtctgccaacctgcccagtccactagacagtgtgttattcactgtaattttcatattttggctatgagtctattgtatctatgagctgaagggtatgtttttgacatcaacctttgtttttttggcatgtgtacatctcactaacataagctacagtacctattctttaactatacaaccacctccttggatgctattgatttccttatactggatgtacttacaattttaatgacaatgtagtttggctgctaaatatttctgcttatttatttaaaaccatttgggaaactaaaactgcttcaacatcaacactagcttcaatcttccgtattctatttttatgttttccttgtattgctattgttcattaattgattggcttttccagcctactacagcctccctagtctgttattcagcacagaatccagcttctgtgacttcacagcctcactctaaagtgaaagtcagtgttggtaacatgaccaagtacacgtgggttgactaccaccacacaagtttatatcctagactgacttctgagttttaaaaatagaaaaatatggaggaagagatggtaatgcaagaataggtagatggtagtgcaagaatacattcatcaacttaaagagcaacatggcaccactataacctaatggcaagacctgaaaaatccaaacacaagtgaagcagaaaaaaatgaccttaaaataactttatgaagataatagaagcccttaaagaggaaaggaaaaattatcatagaagaattgaggaaaaaatggaagaaatcaataaatcccttaaagaaagacaaaaaaaaaaaaaactaatcaaactggttaaggaaacagttcaaacttgaaaattgaaatagaatcaataaagtaaacacaaaccaagggaatttaaatctgggtaaatgggactacagatacaaccataaccaacagaatgcaagagatggaagagataatctcagggtttgaagctacaatagaggaaatagatgcattggtcaaagaaaacattaaagtcaacagagtcatgacacaaaagattcagaaaatcatggacaccatgaaaagggcaaacttaagaatagtagggatagaagaaggagaagaataaaagctcaaaggcacagaaaaatatattcaacataaacattgaagaaaacttttccaacctaaagaagaatatgcctatgaggatttaaaaataaaagcttaaagtacatcaaataggctggaccaaaaataaataaatgattaaagttcccttaccacataataatcaaaacactaaacatacaaaataaagaaaaatattaaaagctgcaaaggaaaacatccaagtaacatataaaggcagacccacctctcagtggagactctaaaagacagaagatcctggacagatgttttgaagatactaagagaccagaggccagcctagactactatacccagcaaaactttcaatcaccattgacatagacagagaaaaacaagatattccatgacaaaaccagatttaaacaatacccatatacaaatccagccctatagaaagcattagaagaaaaactccaacccaaagaagtcagctgtgtccatgaaaatacaggcaatagataatcccacaccaaacacacacacacacacacacacacacacacacacacacaaacacaaacacacaccacactgccaacaacaacaataaaaccaaaaaaataacatgaattaaaaatcactggtcattaatatcccttaatatcaatggactcaattcatctataaaaaaagacacaggctaacagaatggatataaaaagaggagacaaccttctgctgcatacaagaaataaatctcaacttccaaagacaaatattacctcagggtaaaggtttagaaaaactttccaattaaatggacctaagaagcaagctggtgtagctattattatatctaacaaaataaacttcaaactaagtctataagagctggacaaggatatttcatattcatcacaggaaaaaagtctatcaagatgaagtctcaattctgaatatttatgccccaaatacaagggcacccacatttataaaagatacattactaaagcttaaatcatacatcaaatactaatagtgtgcaatttcaacaccacactctcaccaatggacaggtctaccagacaaacaattaacagaaaaataagggaaccaatagattttaagactcaaatcggattaatagacatctatagaacaaaagaatatgcgttctttcagcacattatggaaccctctctaaaactgacaattcggtcacaaagcaagtctcaatagataaaaataaaaaaattggaaaaaccacctgtattttatcagatcaccatggtttaaagttagaattcaaccacaccacaaattacacaaagccaacaaactaatggaaacttaacaatgctcaattgaatcacaactgggtcaagaaagaaataaagaaattaaagacttcctagaattcaatgaaaacacatgtacaacatacccaaacttatggaacaatgtaatggcagtactaagagaaaagttcattgcaataagtgtctacataaagaacatggagaaatctcacagtagcaacttagtagcacaccagaaagccctagaacaaaaagaagcaaactcaccaaggaagagtagacagcaggaaataatcaaattgagagttcaaatcaataaaatagaaacaaagagaatgatacaaagaatcaatgaaacaaatagtcagttctttgggaaaataaaaaatgatagaaaaatccttatccaaactaacaaaaaggcagagagagactatccaagttaacaaaaccagaaatgaaaaggggaacataacaacagacactgaggaaatccaaggaatcatcaggtcatatttcaaaaacatgtactccacaaaatcagaaaatttaaaagaaatggacaattcgctggatacgtactatataccaaaataaagacaagataaactacttaaattgacctataacccctaagaaaatagaagtcattaaaattctcccaaccaaaaagagaccagggtcaggcaatttcagatcagaattctaccagaatttcaaagaagagctaataccaatactcctcaaattgttccacaaatagaaacagaaggaacattgtcaaacaccttttatgaggctagttaccctgatacttaaaccacacaaagatgcaacaaagaaaaagaattatagaataatctccctcataaacattgatgcaaaaaaatagtcaataagatactggcaaaccaagtccagaaacacatgaaaaataaatcatccattgtgatcaagtaggagtcatcccagagttgcagggatggtctaccattcaaaaatctgtcaatgtaaaccaccatataaacaaactgaaagaagaaaaaacccacacaatcatttcattggattctgaaaaagcgcttgacaaaacccttcatggtaaaggtgtcggagatttcagagatatgaggaacatatataaacataaagtcaattcacagaaagctgacagtcaaaatcaaattaaatggagtgaataccaaagcaattccactcaaagcaattctattcaatacagtactcaacattctagctagagcagtaagacaacaaaaggagatcaagtgatataagtgcaaagaaagatacccccaaaattctaccaaagaagtcgtacagctggtaaacaccttcagtaatgtggtagtgtacaagattatctcaaaaattagtacccccttatgtataaatcataaactgatgaagaaagaaatcagtgaattaccacccattagcaataactacaaataatatcaaacatcttggggtaactcaattcaaacaagtgaaagacctatatgacaagagctttaagtctctaaagaaaaaaattgaagaaggtatcagaaaatagaaagatctcccatgttcttggatagataggatttatcaacatagtaaaaatgacaatcttagcaaaagcaatctacagattcaatgcaatccctatcaaaatcccaacatgattcttcacagactttgaaagaacaatactcaaattcacttcgaaaagcaaaaaagcttaggatagctaatgcaatcatgtacaataaagggacttctggaagcctcaccatcccgacttcaaactctactatagagtcattgtaataaagacagctttgtattggcataaaaaacaaatgtgcaccaatggaatcaaactgaagacccagacattaatccacacaactatgaacacatgatctttcacagagaagccaaaactgtacaatgggaaagaagaatgcattttcagcaaatggtgctggcacaactggacatcaaatgtagaaaattgcaatagatccatatctatctccatgcacaaaattcaagtccaagtggatcaaagacctcgacatgaatccagtcacactgaacctgatagaaaagaaagttagaagtacccctgaactctttggcacaggagaccacttcctaaatataacaccagtagcacaaacactgagagtaacaataaatgggacctcctgaaactgaaaagtttctgtaaggcagaggacatggtaaataagacaaaacatcagcctacagaatgtgaaaagatctttaccaacccatcctatgaaagagggatgatctccaaaatatatacaaactcaagaatctagacatcaaaataccaaataatccaatttaaaaatggggtaaagatctaaacagaattctcaccagtagaatctcaaatggccaaaagacatttacagaattgctcaacatccttagtcatcagagaaatgcaactcaaaattactcttcagataccatcttacacatgtcagcatggctaagatcaaaagcactgatgacagcttatgttagagaggatgtggagtaaggaaaacactgttccactgctggtgggagtgtgaacttatagaggtgctttgaaatcgtatggaggtatatttcaattagatagatattcttcaaaactttcaaagaccttcagaatatggcatttaaaatggcttaggcttttttcatgacagtgaaacacaatggttcctggcaataccaattacatctgagaggaaggtgggcatagaagaaactcattatagagtttgctttcaatgtggtgagactatccatttgagcaagaaatggttcttacttgaacttttgactgtatgctatataaagtggacatacaagacccacaattatgtgactgctgaacttgcaaaacaagatgggacaatcctgaagggtccctacttcatggaagagtctgccagacattttgcaggtcacagagaataatgactgacaaactgccaatacaggtgggacagtttcaaatttcctgcttcaatgagaagccatagccagtggccagcagtttcatgattaatatagtatttgtgtgatcatttgtgaagtggcagtggggtctagcctggccaaaaatattcatgatacacataggttcagcataaacacttcttaaatacttcacatttctaatgcatagcataagtatgttgaaaaggtatctgttctgccaaaactgaccaaataatattatttcagaatgtgcattgttctttaatttttaggaaaatcttgtccccattcggcataagtactgtgagaatcttagcaaacactgttttaggtatgtcaatcaatattggcagaaaaaatacacattttatatacaaatcatcaatctatgaacatagtgtgcctttcttttatttggggcttttaaaagtatttatctttaaaatttcaacatacttatgttattcaatttttgaggcagtgaatgcaggagtattttattttctgacatcataattaatattttgctaaataagtttacatttaacttccatgtataattttgtcatgtgataattctgtagcaatcaagaaaattgaaaaaattgtactaaagaaaacattgattctaacttttatgaaattagtgggaggcctggagagatggccaagcagttaagagcacttgttccagcacccatgtggtgggtcacaaacatctgtacttgtaaaagggtatttcatgccttcttctggactctgcaggcaccaagcatgtgcctggtgcacagacatacataggggcataagaacttgaagtttaaagctattctcaaatttgaaaatataatgtacaatgaaacaggtaaggggcttacacaaagtatgatagatgagtcaattgagaaaaattccctatttgaagacttttaggataagaagaactatgtacaaggaacaattttgaaatatgagatatatcagtactaattattctaaatgcaaggataaatatcattttaatgaacccacaaaatggagcaagcatgcttgaaaaatgtaggcaaagtgtttaattgaaatgatgtaataatacagaggaattatggtgacaaagcttaacaagaaactactaaaaatggaaaaatcatatttaaataaagtctacacataacaggtagacacaaagaaatagaatatttttttgcctcttgaaatgaaattctttgaatacacccaattattttcatgatgctgaagtagattctaatctgaagaggggaagacctagaacagatgagccactcagaacagaaataagatatagacttccatctagaaaactgtagctgaaggaccaagttcccttagctcccctcactgaaactgaagtaaccccaggcaaaacccacctacatgacatatttggcagccactataattgatagtgtcatgtgccacaactcagagtccaaacagttaacttgctctcattttcatataatcagatataaatactaatagaataaggatgtaatttatgtactaaaagttaaccagaaagagaataatgtcaaggtgtgtgctctctcattattctgggaaaaaagaggatgggaatgtatctaatacaaagttctattagataagtagtattagagccctgagatcagaacattatatagactgaacaggtatatttagagacacacacacactcacacaaaaaagtaaaggaaaagaggtaattagtttgaaggagagcaacataggagtacatgggggggttaggaaggaggatgggaaaatgatgcaactatataatagccctaaaaagtaaatatatatatataaaattgtaaagtatcattaaaactttcatggtcattattacaatagtgtgtgtttaatatgtgtgccattgtgtatgtatgtatgtacagcagctactatgaaggcttcattgatacacttgggctataaaaagtgaatgaaacaaacaagtcctccattctggaaacctaatatgcaagatggcttgagaaaactaatctaaaatgtttatgtatattatatcatattatcatgaaagacaaaaatgggaagaggaagatagctgcaccattcaacattaataaaatataaaatccattctaatgacactgaaatgtcaagggatgaagacagaacatatagcaagaatcctacctggtacacatgaccatggatttgattcccagttttgcagaaaaaaagaaatagcttataactgttgaagctacaatctacaataaaatttccagtgaactcaatacagagttcaataataagtctctgagttcaggtctccttaagttcagagtccggtaaattttactctccctatacctctatttcctccactataaaatagagataatcatgttgttgctttcatgagacttttgagagacatctagaaaggtgattggctcataaaatttgaatttgttagtgtttggtatttagcatcacattattattattattattattattattattattattataattattaagaggatccatctctccagcctctgaatctggccatttgtgaaatcatgtatctttccagtatccaatgggaaagtctccttactgtggaatattttgaccacactctgacactaccaagactgacaataaaatttactttgaattagagggtggggctagctactagctaaccaaaagtaaccattgaggttttggaagactgagaacatgtaaagagacaaaggaagtagaagagtggggcttagaaagatttttgacccttttggattgaggcgagagagagagagagagagagagagagagagagagagagagagagagagagagagagagatcattggtcacttctctgctaattctctgatcattcagattcttttcctaatatctaactcctgagtttttattgataaagaataattagataaatgcttcatctggtatcaacagggagcatgagatcacgaggcagctgccctgacactacaactagagctccctccctcccaccaggccctctgcatgagtctggggttttccctgttgcggcctccagctgctacctgtcccaggccccaaaggccacaggtggttgggaaccaaatactgccagaattagcacccactactagctggttctgtaattcaaatggcaccacgacctaattttccaacacatatgcttcttctacaagtctccctgtgtccacttttcaggaggctggtcactctccctatgggttgcaggctttctcaaagcaccttcatcaggctactgtcacatcaagtcagataccttgacatgtattttggtttttgtgctgttgccactgccacacactgtcagcccccagctatgtacaagcatctacagctaccctcatccagactgtgcacttcctccattctctgttcaaccatgtggtgcagtgacagccatctgcccacttcactgttgtctcactagaccttagtgagatatctggaaattgttgaggggtgagttaattttttttaaaaaaagaaaaaatagttttacccatgttaaaaatggcaaacaatattacaatgcagaatgttatgtcactctgattccacagcgaatggtttgaaagagaaaaattaaatgaagggataagcaatttagctggaattggcataatgttgattgtaatcatcatcacttggtaattcatgtttgacctttaaaaatggtttgccaaatacaaaaacttgagtgataagacacaagccttagaaggacatactaatgaaattcagaaaaaatattcacatacagacagatgagtttcagcagaacatactgggccattgcattatgaaactgaaaaggaacagcccatggttattagaaaaccaaccttaatttatccaattaccattcaataatggctatcaggtaatatgtaccccaaaactattcagaagttaactggtatcctgagaaatgttagatttgaagagatttaaggaagcaatagtttcatacggcatgcatttaacttttggaagcagatgttaaattcatggaccactcagagaatgatttacctacagcaatattgaaggctggtcctcatttacaaaggaaaacatagtggagagaggaagctaggatcatagaacaatgaaataaggctaaaggtattgaaatttcccaagaacagcctctcatagatggccagtttgctgatttgaaagacagattacaactgatgatcactccttggctctatgctgtatagcagctttgaatgcttgggacagggttgaagaataaggaaacaggacagagtcatttattaaaattatgcaagaccccctgatgggggttgtccttctgtatatgtatttctgttattggttgatgaataaaacactgtttggctaatggaggaaggaagataggcagggataggagataaggagaattcttggaaaagtaggcagagaggaggcactgaaaagggatgccatggaggaaccaggagaataggatgctccagatattctctggtaagataagaccatgtagaaatacatagagtaatagaaatgggttaataattaagaaagagctagacagtaagaagccctagacggtaagaagccctagccattgtccaacaattttataattaagatagtgtctctgtgtatttatttggggctaaaattgggaaggtgggacaagaaatttcagcaatacccccatcccaaaggcttcattgagtattcactaagattgacttcatctcaaataattgttttctagagataaaccaaatagaaggccccagtctactgaaatatgcagaaagtatggcaaaggcttgcattggattaacacatatatataaacatcagacaagcaaggtaaccctttgccatcaggacaagtgttgtgaaataattttgttgttgttttttgaaacagggtttctctatatagctttagagtctctcctggcactaactctgtagaacagactggccttaaactcacagagatctgcctgcctctgtcttctaagtgctgggattaaagttgtataccaccactgcccatcatggaatactattttaactgggcaaagatgtgtgacacttgttaatgctgtagaatattactttaataatttgaagatatgttacatttgtttcttctgcctttgctaatgatgtgaagatgtattacatttgtttgtgatgcatttgttaagtatgtaaagatgtgttgcatttgctttaattaagtaaaattgacctgggctcagagaggcagggttagcaactggttgacaggaaatagcagggagaaacttagcatgggtctttttcaattggggcaatgtggaagggagtggcttccagggataatagctaaaagagaaagttatccaattgctattcttatttttggttgtttgttttttttttttttttttttttttttttttttttttttggcggcggggggcgggggttcggggagcccaaacaacaaattcctttttagtaattttcacatagtatgtttaatgaggggggaggggtttgagaaccaatgaccggcaccaattgctattctaactctctgagatcacaagttttcaccctagcctttgaatcctgagttttattagaatgataccgatttagttagaagtacttttagaagcagcaacagagtcaaggggctatggacttagccgttgggatgctagtaatttaaattgcagctactctgatgaaggtaaaacagcacccatgtcaaatttggttcaatcattccctgttagcattgtgaaaactcctccacagagcaattaaaagacttaatgcctgttgtgaaaaaccacacttctctgtgtaacagaacagcttcagcagataaaacaaagtttttttggcaaacttctataaatgatcaaagatcagattggcctcttcaggaggtaaatgttcagtttttagggattggaactttatctcaggtaaaacaaagtgtaacatggttctaatgtacagagtcagaataacagatagaaaaatcaaagccatattttattagcatagcaatgaatttatggggatgtgatttgttacaataatggaaaccctagataagcattcctctcatctcagaaataaaccataaagtaatgtatacttctgagaaaatattgaaaggtattatcaaaaacagtcactgactattccggttctacataagcagggcacaacagctgctgatctttcaaaggtacaaatagacctacatgtaaaatggttaactgaaaaacctccctgggtaagaaaatgtcccttaacatcagaaaaattataggcatcagaacagctgagacaggagcagctaaacactcaacatgttgaagaatataccagtcgctagaattcttctgtatttgttattaaaatgacatctggaaagtagaaaagggtaacagatgtaagagctattattaatgtgatccagccaatgggccttttacagcctggaatttcgttttcttctttattacctaaaggatgatctgttatggtgactgatttaaaagacttttttttttttttactatacctttacaaaaacaggatagagaaaaatttgcttcacagtgcctacttctaataattctgaacctgttaaatggtatcaatagaaagtttttcctgaagagatgttaaaccttgtgtcagtatttgtaagcagccattggaaataatttataggtaacgatttcaaggtcaaatacagatgtaatttggacagacagatggtcttcaaacatttcagagacctacagaatatgttatttaagatgttttaatagcataatgcttttcatgacagtgagacacttctgctcctggtaacaccaatatagttttaaaaaggatgataggcatccaaaaaccttcatatggagccaagtggtggtgcaacacacctttactcccagcactcaggaagcagaggcaggcagatttctgtgagtttgaggctcgcctggtctacaaagtcagttccaagacaggctctaaagctacacagataaaccctgtctcaaaaatcaaaaaaacaaacaaacaaacaaacaaacaaacaaaaaacatacagagtttgctttcgttgtggcaaagttaaccactggacacaaaactgacagtatgctttccaaagtggacaagcaggacacaaagtgactgatgaactttgacaagacaaggtaagacagtacttcaaaaatccctgctttacagaaaagtctgacagatgttctaagcctgtatgttgaaggtggatgccccaatgatgaagaggaaccttgggtgacttttcaggcactcaaatgttcaaatgtctctgtcattttgatagctttagaagttctttgctcagcacttcctgtttactcaggtaatattatatcaattttgagtgtatgatggggtttaagactagataattacacttatagtcttctttgttaccaaattcaggaaaaaaattcacaaaagaggtataacacatataagattgagagataaaagcttaaattgtttagctaagaaaatgtttttaggtcttaaaagatagttattttattattatttattagtattttctctgaatttgccaaatgcagatggactggacattgtgaatgtattcctattacattgtgaatgtaattcttacctgataattgttcttaatgtatataattttactgagttagagttaaaaccttacctttttatttagacaaaagttggttaaatgctattggacattttgatcacactctgacagtccaataactgccaataaagtttactttgaatcagaaggcagggttagctactagctgaccaaaattagccacggaggttttggaggactgaggacatatagagagaaacaggataaaatagtgtgggtcttagaaagattcctggcccttttagataaaggaaggggaaagagaggagatcactggtcacttctctgctgttgttctgatcattcagcttcttaccccaatatctgactcccaagtttttgttgataaagaataattagataaacatttctgctttttcctttgatgaagttgaaacatgcaaacagctttggatgttggagagggagcatctctgtgaattccttctggaatctccttcatgtttccctgtgcacaggaaagacctagctgctgacatatcatcttccatgttatgctgaagaggatggagaatgtatgtttctctaatgccactgctaacaaatggcaagattcatggcttaccatgtggagatttttctcttaatagattccaaaaaaaagatgcttgcaggtctctctgaattctctcgaattttctgctgactctggggcctacttgattttcagataagttattgaaatctttgtgtctctttgtgtctgccctcatcttatacccaatgtatgtccctttgtgcatgtccttaataacagtcacgaaacataagttgcaaccgactccatttatctgacctccatccttactttaattatatctacaaagaacatactttctaataaagtcaatttccatggtatcagatgagtaaaatctctcaggaaacactacttaagccattaagacagcacatgtggtatgagtagaaagcaaaacctgttttcaattattatcagctaggatcttttagttaccatagttacaatagtctcatcctaatttttattcctctttacagaaggattatatctgatttgaaccagtacaaattattttaattgtaggcatttgttcaggtataaaaattttcagagcaatgtataatataaattaatttgttatcagtaagtggtcttacattaataatacttagagcatttgttattagtctagtgaattaaagtatacacaaaagaaaattattcagtttgtgaaccaacagaactagcttgaccattttaacttaactaataaatcaattaaataaaaatggccaaataattgcaataactatactgtaactcacatatggagatggcacctagttttaaaatgtgagagagggttaacatcatatattctgtacccaggcattgttagagtaccttctcacatattttaactcatttttcccttctaacacggcttctatgtattataatttccattttatgcataatgaatctatagcacagagaattttagctaggcagcccagaccataaagccagcaaagagtagattctgaattttaatctaagattactggctaaccaaagctgtcttcttttctttatgatgctgtgttcatagactgtactaactaatttgatttacttgttcaatgactttagagattgaccgaatcacttacagctgatggcattatctgtagacaccccagaacaagttgctcacattagaatctattccatctctgcatggtaagctttgcagaacctagaagggctaagagaagtctgtccccatcctttgattctgagcatggtgactcagaagttaaagggaagaaggcaacagtagtaggatgcttaatcatttaaaatattgatttttttgttgtatcgttgcctcattttagtatattttatgaagtatcaaaagagtctcttcagtcattcattaaccaaaattttctgtgaaataactaacattagcacatagacaactggtacaaaacatctcatttatcaaaggccagagtgtccacataattctatgtatttgtatagaatattatgcttcatcttttgcctatgagtactctgttgtctggataaaatgaattctttcataactgtttgtcatggatgaatgtgaaagttaatctgatgctaaaggtctgaaattcactatgacttagggaatcacaaaattaaatccagtcttattgtcaggaattttaaaatagtctaagttttatcttaaaacacatataaggtctttctccacttttctggctctttttaagtaaatatgcaaaatagataatatgagaagtggataatactagaaattacaggccctataaataactttccaatatttgaagtggatataactcctttttaaaataccagcatgtgaattttaaatgggttgtgcttttttgcagtacaagcctgttaagaagcactttgggaaatcatctatcacaagtgaagtcaagtctggcctcatttactcattgtgcttcctgtatttcagctatgtgacccttagctgctaagttgcagttttagtccctgtgctgtaatttaactagtataaaagtgattctatcatgtcttcaaatactttccacatgtctagttttgttgatcattttggttccatatgaaataaaattcagtcaaaatgatttttcagagcttaaattgtcataagttgctcttaatcacaaaatgaaaattcttcctagattagaggtgagtttagagatctataaccaatagatgcagtccttctcagcaatcaatattatccccctctgcaatttttgaagaactcagcttaaaggcaaaacttactatatttgactaaattcaaactcaagtgttcaactttatgcttaaggatggctttccttaatgatctctgacatctagctgatagattacatatgaaatgacagtattgtgtacatggtctttaaaagtgggaacactacatagcaaagtatatatctgagatatgtgtgccacaaagatgtggttgtgagagaatcaccatttcaaggctcctatgataatgatagtttcttaggtcacaagcagaaacaaacaagctttctccccaaggggacagggtttagaaaatacccattccagtgatatgcctctgccttagaggaagaaaaagggagaatacaaagctatccatgaaagtttgaactatgaaagaagagtgtaagacccttcaaatgggatatcctagctgagatagtataggatacccaggagctgcatatgactttgtgtgatagtcattaatgcacgttcaaaggcaacatgaataactagaaatgcagaaataaaatctgttaaggtttcacacttaaatatgaatattgaagagttataataggaatgcaattctcatgcctgaactgctcatgatgccacatttcagaggaaatgccctgaaacctgaatctaaccagcaacctctacattgaaaacagtgtgatgactgttgaaggaagagaaagtttcaaaataaaggaatgaaaccactagcagagatatggttaaggatgggggatggatgtatcacaaattagatggattgttcataggaagtaaggtgaaaaaatcccaaaaggaaataggcatcataaaaccacagagtaaagaaggttatgcttgtgagattgcaactgagattgtctaggatgaagagaggatccctttaatcatggaactacacaaaccttctgcaacacagattcttaaagagatgagtgagaaaaggaacagagacaaagaaatatgatagttcatcataatttaatttaaataactgaatttgaagtctcagcactgcaaaaacattaaataattcagataatttaatatttttaattttaatattgtaattgttttaatattctcatcacagtttatctatttaatttggagagacataagtgccatggcccacatgtggagataagaacacattttgtggtggccaattctgtccttctatcctacaggtcctggtgatcaaattcagtctgtgggctttgaaagcaagtgcctacaacatgataaagatatttctgaccctaagatacatctttttaacattaggctattagaaaatgcatgaataggtgaatgatttacattgctctaatcagagagcttacaacagtctcacatgaaatgaaaggacagattcttgtcattagtgtcagaaacatagaagaacctctgtgtccttccaccatatcagaatcacagaaaaacaaaaagttcatacattatgtgacttcactggcaacaatttgccagatattcttgctctctgtttaagctctggtagatgtaaagatggggtctcttattacagtcttaattaataaaattgagtctcagatcatacattaaacattatacaataaatgccatgctacatatgtagcttaaagaatgtctacaaagggttaaatacataaggggtttcaaggaatcctgagaagccaaagcttggaaactaacagtgatgcaaatggggacttagaaagatgggagactttttggaattgccaactgctgcatgtctcagatgatttgtagatttgagttccactgtgcaggtgaaagagacgggttgggtctataaaaagaaagaggtggagaggtacatgttggatcctcaggtcatgtcaaaggcaggaactgggcagagctgagatccctaagacaggcaggagatgcttgcctattggttcctggaggcacgcaaagggtagtgagtgacaaatgagtgtgggcaacagatattgtaatgctaggtattttttctttatacacccaggtgggggagttacacattttctgtgtctgttatgtccaataaattcttctgtctggtctccctgatatgatttaatacaccatgtgtccctacagtcccaatttaccccagtaaatttatagggttgcacactttttctcccaaacaaattattcattaatctgtactttgtgggtagtgatgaacagatgttgttattaacatagctacccagttatagagtcatcttttctcaaaaatgagtcatgctgatccatggctctccaccccggggcccagaagaggatacaggaatatgcccagtgcctgtaagcctgagtgggagacaaagatccacatgctggtctagggctctctgccttgggcctagaggaggaaacgtgggccttcctgatgccaaaaaacgctgggaggatggaatcttattatggtgagcaaatatgtgattgactatgaaagagagagagacagaatggttcatgtcctgcgaagagaggcaaagctgaaaagatgaaggcaatggtaattgggctgaggccagtggcctgcttgcgacttgaggccatgggggtatttgggccatgcttgtacctgaggcccttccacaactgtaatctgtgttcatttctgtggcagcattggtctatgttaatgtctatggcttctgtttccaccaaaggcctagagggtaggactgcacagaattggactcactcctcactagcatcgacactagggagaactggtcctactcctcactggctgtatcacaggagagaatgggtccctgcacatcaactgagctgcatgacagagctgactataggcaggggtgcgggaaagctggctctgagagtgtgagaggaggagacctggtcccaactccatctgccacgtgatagcatgggtaagggaaaaataccattcctccttctccccttgtcacctgcttcaggcaggagagctggcccagccccttaccacaagcagcaatagggagagctattgtacctcagtggcaacacagtggaatgatccttctggggatggcacaggcgagccagaccttaagatgtgagggtaagagggctaaccccactatttatatgtcatgaaacatcatgggctggcaaagatgctttccttgcccttcactgcctgcagcagacagaaaagcaggctcctgggtcatgagagtaggggagatggtcctcacctcactggctgggctggagtactcaagaacacaggcccttcaccttgcctgagcctcacagtagtgctgatatagcaggcagaggctcaggtgagcctgccctgaggtcacaagagggggacagttgaccccataacccttattcgccatgtacaggccacaataagagaaagatgctctcccttgccccctaactaaactgcagtggaccagagaactgaccctgccttaccagattcagcacttaggagagtagactctgtaccttgcctgagcaacacagtagagaagatgagccagccagaaaatggaagtgtgaaaaatctggttcatctcaacataaggtggcatggacaagggagagaaggctcccactccccacacagcctgtggcaggtgggagagctggctctgaggtcaccaaagcaagagagctgtccctgcctctcagcaagtgcagtactctgcagcgtggtccccactccttgtctgggcaacagtagagctgttcctggtagaaaataaaaataattatttgtttgtcttcaaaatgaaaatcctacaatttcagtgggaaaggtgcagattttacacaaattaatgcaaacttagggcagggtacagcctgatgtcaacaattctggttttgttttgaatttaagacaggattgtctgtatgtaaggctggcctggaactggtatttagcctaagattactttgaattcttggtctccccagtctctacccttaaatgtcagagccttatgtttgtatcatgctagggctcaagccaatgcttgtgcattcagcttcatcattcacctactgagttacatccccagacccagtggacagatcctgtacagaacagacacattgttcagtatggatgaggagttaaatggaaaatgtagtctatccaggtttttgttttcacctcttttggttgtatttgtgacattttccttttaaatggagaacaagcaaactagagatacagaattctaaacctggaattcatctgcttaccaggaaaccaaggactataaaatttctctaaaagtacttagtgaacctagtatcttattgtaaaatacgagaaggaactgtaatgtctccttgttcttctttattatatgacataagttagaacaaggactgcattgctgactcagctcccctcatagctaatctgtgacatcttcttatgctttattcctgactctgcctaagacatcaccacaagtcttaaaagctccaacggtctcctgaaatccatcagttcacaaagtgttattcatgcagagaaagattgggagacacatcctcatgatcttcaacacaaaattatttcatcaaccaggagacaatgacatcactcatcttgtcaataaagagcacagctgtactaccctgcttctgccatcctagtgattcaactgagtagtgatcttccaggaaataacaaaaaaatataaaatttattaaattggaaaaaatacatttaagtaaccatatttgtttacttgtcttcctcccactttctatgtgaatcacactatgtttagaagctctataaaatggcatctcatcttccctaatacttgcataacataaatctactttcatttcttacattacttgtttttcacagactgtaagtttacatattgactggatgtatagctagtggcctttaaacatcttctataaggatgcatatttaagaaatatttagcctaattaaaatcacacaaatggttcttacaaaaacctggtgttaaagcacatttacttcaatgggaagctgaaaggaaggaaggaggaaaggaagaaagaaagggtgtctttgcttgaaaagtagaggttttttttcttagaccattaaaaaatatcaaataggaaaaataaaaaccaacaagcaaacaagcaaaaatattggtttctattgagagtgactgtgttaatcacatacctctaattaggttgcaaatacttgtttacatattcaagctctcctcacacttctctgtgcatctaccacatagtatatgtccagtaccctaatctctgattttaaaataatgcctccctacccttagaaacatacttcacagcatgctatagaaagaagagtcaccatggtacaggagcattcaagtgtgctcatgcctgatctgtgagtataacctgaaaacttcttgatagaaaattcatgagaaatacattatgggcaagataagacaaaacaatatcacaggtattgatgggaaagcctgacaagctgccttttgattttcttaaaaataaaaatggtgaatagtcctcctagggaagggaccttaatttggttacccaataccaagttgtcagccttaaaatcacatatataaaagtaacattatgcatgctgagcagattatagttatgttatatttatagcatatataggtaggtaaatagatgacagacgcaaagatacatagatatctctgaatataaattaatatgcatacatacctaaactattagaatacagtaaatataaatgtataaatacagaataacaattggataatgattaaagttaatgagtgagcctttggccaagggcatagtcctttcctaggtttgaaactaacagattctgactatacctcagaagcactctgagacagagcacatgccagcagatctgtggtctccagttcactccctccccacagacacaagaatgtaattccaaaggaaatcccaatgatctccccacaccccaatttcctgtctctggaggaatgcagtggccaaagcctgatcatatgatctgccttttgtctctgcctcttaccaatatatgttatcattgcttctttgctttgaattccagggcgggagtcacctgctacctattgctaaaattaaatttaaagaccaagtacaaagttatgaaaatatacatcctgcatgaaaattctatcagcaagtcaatcataattaaagagaatgttatgtgatgctgatggctatttgagaatttaattttttgtagaattctgaagagcctttgaaaattaaatctatcttcatatcctcactgcttcatttgagccatttcttaacaggtgtgttctcagggaacacagactaattgtattttggccagacataattaagactctttgcacaccccaaatatataatgcattcttaattgattttggattatccatgccactgattttcccttgagtagacaacagaggggtaagtttatgcactagcatggggataggaatgagtattgagcatgtagacacaggctcaattatggcagatactgacttttctctttagattgctgaatatgcacaggtttgccctttgccctacctttggcagctcctactacttaaaaaacaaaaagatcacagtgtgatcaggactcagccttggaaataagacttgtactttataccatttgcttccttgtctgcctatgttaccctggaagaagtgtgtctgcaaagcactcagacattcacaactaagggccacatgccagagacctatgtatgttgcccaaataatagcctacatatgcatgctggatgtggaaggaacactgtcagacagaggaggctctagcactaatgttcctccttaggcaatgcttttttatatactttaatgagagagagagagagagagagagagagagagagagagagagaaacaccagcactatcattgctggaaatagaattcctgttcccaggatttgtgtcaagcacctttacctcccaagccacgccatttgtcccagatgatatcttaaccacagtccatgaacagttctgtgttatggaatttcccacccagttccacagctgcctgggagcccccaaataaacacagaagagttaaattaattataaagctgttggctgttggctgttggcttgggtttcttatcggttagttctgtcttaattattaacccatttctattaatatatgtattcccatatggtcttgacttacaagggaatgccagacttacaactcctttgcctgctgcatgatgactgctcagcatctttgcagagaagagagcaatttcctgtttgtccttgcttatatgctgattctacacagctacatcactttctatctagccaatcagccaatcggtgttttactcattaaccaataagaaaaacatacatgcaaaagaatattccccatcagttctgaacccaaatcaccacactaattcattgtggaaaccctaacccttaagcaaaggcattacaattgctttcattcatgagctaagaatcaggacacaacttgtgtacttttgcttgggacaactcccaaatacctgtgatgtggagcacagtggggtatcactgacaacacaggggtgatacttgcctgtctcctcctggctgccttttgctatttccagagttcatcttcagacaaatctttagagttttatgctattgtatttctctctgttgtgccatttaaatgaaacaggttatgtgaataacaccccccacacataaacacactcaccataaacatattctagtggcatttggctacctgtggattatttcagcctccacattcccaaaacaagtttaatatttggaatgttatgtctatccttatttctatgtagggttagataacaaccataaaaacaggaacagttgagtggatggaaggagaacctactctgctcaatccaaatattctttcagacagagacactgagacatcacattttcttcagagtaccctttcatgtggccttgaagaccagaaataaatcagttaaagaagtaggaacttcttcccaggtccaggaaaaacaagaagtgggttcaattcatggctattttggtgacaacatcttgatcagatgactggaattttctgtgtggttccactttaggtattttttccccaactttttttatttgaattagaaacaggattgttttacatgaaaatcccagttcccttctcccacttgtcctccctaccatcccccccccaactaaaaccctatctatcacatatcctttctgcccctgatggatggtgggaccttaaataaggtgtcatcagtgtctattgtatcctttgggatagggcctaggcccaacccagtgtgtcttggctcagggagtattcctttatatggaatgggctcccaaagcccacacctatgctagggataagtactgaacttctacaggaggtcccatagatttctgaggtatcctcacagaaacctaagttccagggatctggatcagtcccatgctggtattccagctatcagtctggggagcaagagttccgagatgttcagatcagctgtttctgtgggtttcaccagcctggtctggaccactgtgctcttcactcatacttctctgcatctgggttccagttcagttcggtgattagttgtgggtatatgcttctacttccaccaactgctggaggaaggctataggatggcatataagtcagtcatcaatctcataatcatgggagggcatttaagttagcctttcctccgttgctgagatagttagctggtgtcatctttgtagctctccagacatttccctagtgcctgatttctctgtcaaccagaaatgtctccctctattatgatatctccattcttgtcatcatctattcttcccctgactcagactttctgctccctcatgtcttatgcatccctcttattctccccttatcattctcctagctccctgccccctcttcctgggttcccaatttgctcagcagatcttgaccctctccccttctccaggggacaatgtatgtttctcttagtgtcctccttatttattagcttctttgtcagtgtggattgtaggctggtaatccttattctatatctaaaatctgcatatgagtgagcccataccatgtttgtctttttgagattgggttacttcggtcagaatggtttcttctagatccatccattttcctgcaaatttcaagatttcattgttttttttccactgagtagtactccattgtgtaaatgtaacacattttctttatccattcttcggttgaggggcatctaggctgcttgcattttctggctattataaatagtgctgctatgaacttggatgaacaaatgtcctggttgcatgaatgtgctttttttgggtacatgcctaagagtggaattgctggatcttgtggtaaactgattcccatttttttgagtggccatactgatttccaaagaggctgtacaagttggcactcccaccagcagtggagaagtgttcccctttctccacatcctctccaacatgaactgtcattggtgtttttgatattggccgttctgacaggagtaagatggtatctcagaattgttttgatttgcatttccctgatggctaaggatgtgaacactttctcatgtgtctttcagccctttttagattcctctattgagaattgtctatttagttctgtaccccactttttaattggattttttggtgtttgggggactagcttctatgtatattttggagatcaggcctctgtcagatgtggagttggtgaatatcttttcccaatgtgtgggctgcccttttgtcttgctgattgtctcctttgccttacagaagcttctcagtttcaggaggtcccatttatcaattgttgacctcagtgtctgtgctactggtgtaatgttcaggaagctggctcctgaaccaattaattaaagggtatttcccaattgtcttctaataggttcagtgtagctggatttatgttgaaatatttgatccattttgactaagttttgtgcaaggcgataggcttgtgtctaactgcagtcttctacatgtctacaaccagttatgccagcaccatttgttgaagatgctctctttgttccatcgtataaatttggattgcttatcaaaaatctggtgttcataggtgtgtgggttaatatcagggttttcaactctatcccattggcctaccagtctatttttctgccaataccaagctgttttcaggactatagctctgtaatagagcttgaagtcagggatggtgatgcttccagaagttcctctattgtacagggatgttttggctatcctgggtcttttgtttctccgtataggtattttaaatgaaaatgactgtgtttacttaatcaaaggtatacttacaaatctaactttagtctagatgacaccttcattaaatgtcataaatcagacactcatcgaataatatttatactgagaaaataagttcaattctcagtttatcaatttcttctcctattcacttcccaacagtctgtccatctcagtggtagccacagacacagccgtctcctagagtcatgagatacaggactcagctttccctgaatgaaaacctcagaaagtaatggtttggtttagattctttgaggaagaacagttacacttccaccttgcagacacaggtaatgagagttgaaaacaagtgcagggctcccaaagaagctgaaagcaattacagcacagaaggaggaaggaaggctagcaatactgcatttctctgctctttgttcagatgttaaactgatggatgtggaactgtggtcattttcacagcaggtctcccttgccagtaattcccctgttaaggaatccatgagtcaacttaatggaaggaggtcgagtctgtaattttattaaatgccagcaccctctctcctgagtacactctatgacacatttaaactgactgagacttccttcccttccattctctcccatattggcccctagttaattttactgctgtttactctttcactagtcaattaccataagatctataatcattttatgcttctctcagctcctaatgaatgtaatattcagaaatcaaaagtctcataaaagacaaagaattttgctacttggcctgcactgaaatttcatttaatagcattgtcatgagggggtgaagtatgcttttccttattagcaaaatcacagtgtttgaacccaccttctgtcgccaaccctcctttgctcctgtgaaatgttaataatgaagttaaatccagcctgcctgactgttagcactttttccctttcactcacaaaatgcataatactaatgctgattgcctaactgactccattattagataaccccaaaatgtcaaatgggactgtttaaattaggtgagcgaagccacatgaccagatccacacaggaaaactgtgaaccattacaaaatcagtaaaaagaagaaaaggaacttagagaaatttagcagtttgaaattaataatcgagttttagctcctgtattcatctcctttaaaagaagtattttccacttcatttccacttgagcactgcaatccagtatattcagaaggaccaattaaactctcttgacaccatgacctttcctgagttgggtcatgacactgtgggcaattagttggtccaatgtaggtcattgccagcagaagcagctgcgtctgttttccagtagagctagcctgtgctcaaggctaatccctaataagacttggctgaaagttatctgtggttatctttaaatcctcacaaagcaactgtccttctttattgacctcatttggaatcaaggttagctctgcattttttctgctcatttatggttgaggcaacactcatttaaagagatcttaagactaacactaaacttatgagaattttctcaagatagtaaaatgtcttagagaaagaaaataccattcacttgaaagtataagtttgcatgagccatgttctatttcaggtggttctaaaaatgcaggcattgaatgcagcccagctaataatagaaagtaaattagaaaaggtggcctcaggagtttagtgaatgtgcagttctgagtaagtgaaaattttgcccaatataatcatctaaacaatagaatgtgctaaaatggaaagcagataaaatggcaagataaaaatgtgggttcaaacaaccatacattttccaagggatcatcacaggtatcatctgtcaattggccaggtttccaagtcctgaacatccttttgcagtcatcaaattaggggtagtttagattcattgggtgtaagttgctaacttctccaaaaacttcaaggttcgtgttgaggtcatgatggtgaaggacttcaatccagtgtcagcctgtctgtgaagtcttctagatgctcactcagagttgttaattccatttcttcaaacctcttcatacaatcattatattctgagtttgtagtcattgatagacctaccggcattctttaagtagagcaagtaaatatttatttcagaccctgtttccataccaagcacttattaaacacatcaaaaacctaacacatacacacaaacacacacacacacacacacacacacacacacacacacacacacacacacacacacacacacacacactaacttacacacaattatgggacatgggtaacttgtttttccttttaagtaggcaagtttattaaagaatgaacttgtgtggcaatgtagtaatctatatatacatgggactgccacaagaaaggtgcaaattttatctcatggccaagatgtgatacagaagaaaaatactccatatgtgaccttcttccccttaaatgaatgctacaaacatatgaatatgaatacttatttccatttgatgtaaagataactccctggagagctttctgtgtagttcttattgtcaaacggttataaatgaggctgctacagctggccactttgtgaggtttttgccttcatgttagaatattctctcctggaaggaacagaaagacctatgaggctgaggaaacagacaaggaaattctgagaatcaactcagtacactatgactcctgagggctctacctgagttctcacaaatgctaaacaactcttggcttgcaactgcctacaggttacacagggaactccaacaaggggttttcctgagctattacctgtgctggaatgtgctttatgatgatgaggttgtccatgtcacctcaaatttactcactgatttaacaggctggacttggttggaatgagttttgaagtctatggatacccaatccaaggtgagcagatatgtcaataaattgcaccaagaaagtaatgccagaagtgtaaactatttcacacattctacttaatatttatattgcaaatgattcaagatagagggcagtgatagaacatcataaagcattacatctctctctgacttgaaatagaatgcaaaggctaaattttaggtccctaaacaagacatgaagagataacttttgaatagcaaatccaaaggaataaaggtgttgacttgatccatagccctgtctcatttcacatgtgttgctatagatctttcacctaacaaacagcatactgttctgagttactagaacttcaagtcattctattccatgaataaaatggcttatagtcaagaatccatagaaacctctctggggaaatcagacaagatcctagctagaagaaaaagtaatacatttatgatgcaggaaagaataaacacatctgatgatggaccagatgaggtttgtaccaagacagcaaccatcagcatatagtgaattagagaaatatgatatgggtcacttataaatgaaaagttgacctcacaaaaacttctcaataaatgccctgttggtcaatagagatccatctcctctattaaattggaaagtggtagaaattttttttatatttttctttttatttattcttctctcatacatctagactgaagtttcccctccttccactcctcaaagtacaaccacacctcacttctcccctagatccattgtacctctgtttcccttcagaatacagaagtcctctctgggatatcaagagaacacagcataaacaataagaataggcacaaaccctcattcatatctgtgttagtcaacacagtagaaggaaaacagtctcaagaacaggcaaaagagtcaaggagccctaaacatgctcactgttaggaatcacacaaacaaccttgacatatatgtagaggacttatcacaaacacatgtaggctctgtgattgccactttagtctctgtgtgcccctatgagctctgcttacttggttcagtgggaccttctgctgtcttcaagccttctggctcttgcaatcctttctctccttactattcttacaatccttctgaagggttccccaagctctgcctaatgattggcttcttatctttgcatctgctctcatcagctgccagatgaacctctctgatgacaattaggctagccaccaatctacaagtagagcagaatatcattaggaaccatttcattgacttctttttcttttttattaattcttttctatcctatatctctgggcctccagttcctgatcattcagacagtgctggcatgggctccctcttgtggcatgggcctcaagttgaaacagtcattggttggttcatcccacaagctccgagtctcattgccccagcacatgttgcaggtaggacagatcacaggtcgaagattttgtggttgggttttgggccagtcctacaactagaagcttaacaaggttacagaagatggctgtttcaggttccatatccttcattactaggagtccttactcggttcaccttcatagttcaaggaagtttctactgcactaggtttccacattgctccccaaatgccccccccatttccagttgtctagtcctgaaatctctccctccatgcctccctccatcacctatctctccatgttgccatccacacatgcacagttcactcataaaatctgtttccacttctcagagggatccatgtatcctccctagagccctacttgttattagcctcactgggtctatggattgcagtgtgattgtcctttacttaacagctaatatctacttataagtgggtacatatcatgtttgtctttctgtgtctgggttgccttactcaggatgatgtttgctagttccatccatttttctgcaaatttcatgatgtcatttatttttaaagacctgggcaatactctattgtgtaaatataccacattttctttatccaatctttggttgagggaagtctaggttgtttccagtttctggctataatgaataaaattactatgaacatggctgagcaagtatacttgtcataggacagagcatcttttgggaatatgcccagcaatcatatagctgggtcccgagatacagcaaatcccaattttctgaggacccatcatattgatttgcatagtgactctacaagtttgcactcccatcagcaatggaggagtattacccttacttcatatcctcaccagcaagagctttcacttgtgttattgtcttagtcattctgacaggtataagatggaatctcagagtacttttgatttatatttcactgatggttaaagatgctgaacatatttttgtaatttattttttatttaaattaaaaacaagcttctttcacatgtcaatctcagttccctctcccacccctcatcctctgcccctccaccaaccaacccccctatcgcaacccctattgcaccccagaaagggtgaggccttccatggggaaactttaaagtctgtgtatcaattggagcagagcctaggccttccccagtgtgtctagtctgaaagaacttccctcagtgtggagagggtgcccaagttccatttgtgtactaggggtaaatactgatccactatcagtggccccatagattgtccagaactccaaactgacttcctccttcaggggttctggaacagtcctatgctggtttcccagctatcagtctggggttcataaacaaccccttgttcaggtcagcagtttctgtgggtttctccaggctggtcttgacccctttgctcatgactcctccctctctgcaactggattccagagttcagctgtgtgggtgtctgctttcatcagctaccagataaagtcactaggatggcatcaaaaacaccaatgacagtttatgctggagaggatgtggagaaggggaacactcctcaactgctggtgggagtgccaactggtacagccactttggaattcagtatagcagtttctcaggaaaatgggaatcagtctaccacaagatccagcaattccactcttaggcatagaaccaaaagatgcacattcatacaataagaacatctgttcaaccatgttcatagcagcattatttgtaatagccagaaactggaagcaacctagatgcccttcaactgaggaatggatggagaaaacgtggtacatttatacaatggagtactactcagaagaaaaaaaaaactggaatcttggaattctcaggcaaatggatggaactagaagaaaccatcctgagtgaggtaaccccgtcacagaaagacaaaatggtgtgtactcactcatatggattttaaacagggagcaggggattgccatgctaaaatatacaccgacagagaagttaggaaacaaggaggaccctaagagagacacacatagtatgctgtagatggggaaaaggacaagatctcctatgttattggggatcatggggggacgggagagggagttagaagaaagaaaagggcagaaggggaggggagaggaggacatgagggagcaggaagatctagtcaggggaggaatggaggagagcaagaaaagggatacttttactctatgtctaaaattcacatatgagtgagtacataaaatgtctgtcttttttgtgactgggttacctcactcagaatggtttcttctagttccatccaattgcctgtgaatttcaagattccattgcctttttttctgctgagtagtactccattgggtaaatataccacattttctctatctattcttcagttgagggccatttagtttgtttccaggttctggctaaaacaaataatgccactatgaacatagttgaacagatgcccttgtaggaatttgcttcttttgggtatatgcctaagagtgaaattgctggatcttgtagactgattatcgtttttcctgaggagtcaccatactgattgccaaagtggatgtatgagttggcactcccacaagcagtggatgagtgttcccctttatgcacaacctctccagcataaactgtcattggtgtttttgattttagccattctgacaggaataagatggtatctcagagttgttttgatttgcattttcctgatggctaaggatgtcgaacactttcttatgtgtctttcagccattttagatcctataccccacttttcaattggattatttggtgttttggagactagcttcttgagttcttggtaaattttggagatcagccctctgtcacatgtggggttggtgaataatatttcccaatccatgaggtgtcaacttgggggttgccagtctgcagtccaggctgctggagagtctggtaaacaaggagaaccctaaaagagacatacatggtcccctggagaaggggaaagggacaagatctcctgagcaaatttggagaatgggaaggggagaaggaactaggaaatgagaaggggcgaagaggaggggtgaggaagacatgatgggatagggagattgagttgggggaagaagagaaaagagaaagataatagataatagtatagaggggacattataagttcaaagagaaatcaggcactaaggaaatgtttggagagctacaaagatgacaacaactaacaatctaagctatagtgggaaattaccaatatggagtcaagtagaaatataagggtatttattagggaaaagccttacttacagagcaacctagccagccagcatggcagcagtctgtcaagcaagtaccaaagtgaaaccaaaagagaaacgcaacatcacccattctacatcaccctgaccacgccctctaaggcgttgtcagacacacctgtagccaacccctaagtaggcatggctgcaggtttccctaaattccccttttagtctaaaagaggattaagacttaacagtgtaaagtatccaaaattaacaatcataaaggtgaaatataagaagatacaacaatctgcttatatcacctcctatctattttaactaaatcctaaagtcatctgaaagaggtgtccaagcctgaacnnnnnnnnnnnnnnnnnnnnnnnnnnnnnnnnnnnnnnnnnnnnnnnnnnnnnnnnnnnnnnnnnnnnnnnnnnnnnnnnnnnnnnnnnnnnnnnnnnnnnnnnnnnnnnnnnnnnnnnnnnnnnnctgaaatgggatgacaatagtcatgtggggccctgtaggaagaaaatgttagtgtagtaaaagtcttgaatgattgtatccagtccatgttagatgggactctcttgatagaagatctcgcttgaaatcctcaacttgattgaagtcagtacctgaagctttggactgagtgtcagttgaaatggagcaagttggatccagtgcagttgaggaggtgtggcccattttctttccagggtgtcaagggattgctgtcaggcaggtcttcattggctgtgtgggacacaaacataaacagcagagaaatgtttggttgtgtagatacacatgctggggaatgcaaccatgagagtgtaacaattatgagagggtgtacaccttgagagaaagatccaagaaaagacaaagacagtccccaaattcttcttttaatttgtattacatcaattggcttcttgatacaacacagaaacactaaggtttagttaaataatgtgcttggattttagaggaggaaagccaaatctacctctaaacccagcattggtttaattgaatagggactaggaaatgaagagcaatagagttctctgagagacagctgtaaagtttactgtatggcatgttccttttgtttggcggttataactaccttctcttcttaagtatctacccatgcagtatcctttgacttctggagatgagttttcctgtgaagataaaagcaaaacacttccctctcctttgggaggtttctttttagtttatgagatatactttagtagaatacctgtcatttctcctcgtcaagaggtttttccttttccactcaaatcttgatcaacttcaatggtatccaaagtttttcttctcctgtagaaaccaatgcaaaactcctactccaacgtaacacatgtcctggtttccatacagaggttagtacatctttgacgtataccagctgattgagttcggcagtttttcccatagtccagtgtctttctgcagctgtttgtcctttctcattggcattaagaaagtttagtgttaataaagcattatgcaacctatgtttggggggtttagtcttccaagcttgtttgttgagcatctccttaagtgttctattagatcgctcaaccactgcttgtcctgtaggattgtgtggtataccagtaacatgctttatgttataatatttgaaaaattgttccaatttcgtagagacatatgctggagcattgtcagtttttatttgtgcaggtatacccataactgccatcacctctagcaggtgtataataacagaatcagctttttcagagttaagagcagtagcccattggaaccctgagaatgtgtctatggtatgatgcacatatttcaaatttccaaactctgcaaagtgaaagacatccatctgccaaacctcatttctccgaatgcccttaggattacaacctgctggcaatggagtttgattataaaaggaacaagtaggacagttttttactgtcaccttggcttgttgccaagtaatggagaagtcctttttcaaacctttgctatttacatgatgtttcttatgaaattctgaggcttctagcacacttccaattaataaacaatcaatctcatcattttcttgggctagtgggcctggcagacccgtatgggatctgatatgtgtaatatatataggattacttctgtttctgatagtttcctgtaattgtaaaaacagagaagttaattctgtattatcaggaacaaattctgcagtctcaatatgtaacacgactctctctgcatactgagaatcagtaactatattaagaggttctgtaaaatccttaagtaccatgagaattgcatataattctgccttctgtacagatgtatatggactttgaactactttacttacctcacctgctttataacctgccttacctgatttgttggtatcagtgtagaaggtaagaactccagaaatagtttgtcttacaatacatggaagagtccagactgtgttttttatgaatttaattctgttagttttgggatagttgttgctaattgatcccaaaaagtcagtaagagctatttgccaatattcattatctttctacaaggaggaaatttcttcattagttacaggtactataaattctgctggatcttttccagtcagttgacgaagtctttttccagtcagctggcgaagtcttaatttaccctttaaaatcaaatcagaaatcttttctatatatgtctttaactttttattctgtttatgtggcagaaatatccattccaatatagtgtcttccctctgcatcagaattccagaagggtattctctggatggcaagataaccagaatacagtctaaattaaggtttatccgatctacatgtgcattcaatattctgttttctacccattgtaactctttttctgcctcatcagataatattttcggactgtttcggtccttatcacctttaagggccatttttaaatgctttaagtcatgtccttctacaccaataatagtctgtaattgagaaatttcccctaataatttctgaagagaattaagagtttgataacgatctctcctaatttataccttttgaggtctgattctctgtaagtgaatcttgtaacctaaatagttaatagaatctcctctgtgtgtcttttctggggcaatctgtaatccccaatgaggcagaacttccttcaccttttcaaacatattccaaagtttccttattagaatctgataaaagaatatcatccatgtaatgataaacaagagattgtgaaaatttcttatgaatcatttcccaaggttgctgtacaaaatgctgacacaaagtaggactatttagcattccttgttgcaaaactctccactgacatctcctaactcgctgggaattattaagagttggtacagtaaatgcaaatttttctctatcattttcctgtaacggtattgtgaaaaaacagtcttttagatcaatgactgtgataggccatcccttaggttataaggaaggaaatggcattccaggttgcagagagcccattggttgaattatcttatttatggctctcaggtctgtcagcattctccactttcctgacttcttttttataacaaatacgtcagagtgtgagaattccaaggactggtagattcctctatatgtccagcatctagctgttcctttactaacttttctaaagcctctatcttctcagaggtcataggccattgtcctccccaaactggttcatctgtaagccacttcaatggcattgcctttggctcctctgaagatccatcatttgtacctagtttctgtacagcatggatggttggtaaacgttttccatagcgtcttaccacatcttttctactatctaaagtttgtaaataatttgtatctgacactggagaaatattaatctgagtattccattgctgtaagagatcacgaccccagagatttataggtatatctgccacgtatggtttcagtatccatttctgtccttctggtccaattcagaccaccgagttaacagtctgtcgaactctagatagagttgcaattcctaaaaattgtacttttgcctctctaagaggccatttctgaggccaagatttttaggaataatagttatatccaccccagtgtctactaagccagaaataactttattattaattttcactttcaactgtggccttttatcattaatagaagcttgccaaaatatgcgtttctcattttgtccattcatacttgattcttcatcactattcaaactatcatcaagagcagtatcattttttaaattaggcaaagaactatctattggtcctgtgagaaattgtctcccactgctactgggaatgatccaacatttctctatgtggggggcttcttgagtccccccatcggggtttcccgaccttaatgagtttcctcgaatgtccctagttgatctactttcattggtccactgtctgcccttaccacatcttctaaacaatccagaaggcagtggccttccatatgaggcattgttagaattcatttgtctacaatttctcttagtatatcccatttaccacagttcaaacttgtaggttcctggagcctttgtggtctccaggggaaggctcttcctacccaaggttctggttcatagtagtagtaaactctagcctcttggtaactatgttgacctctgtaagttgcttctccttgccaatcccttacatcctcaccttctgaacttttaatttcctgttgccattttaaaagtttggagatggcttctcctacccaagctccagtatcttgcacattatagtcaatgttggctgcatacaaacccattcttctagcagagctgatctgatctttaaaggcaaaagtattcttttgcatnnnnnnnnnnnnnnnnnnnnnnnnnnnnnnnnnnnnnnnnnnnnnnnnnnnnnnnnnnnnnnnnnnnnnnnnnnnnnnnnnnnnnnnnnnnnnnnnnnnnnnnnnnnnnnnnnnnnnnnnnnnnnnnnnnnnnnnnnnnnnnnnnnnnnnnnnnnnnnnnnnnnnnnnnnnnnnnnnnnnnnnnnnnnnnnnnnnnnnnnnnnnnnnnnnnnnnnnnnnnnnnnnnnnnnnnnnnnnnnnnnnnnnnnnnnnnnnnnnnnnnnataaataccctgaccaagaagcttatctagagaggcttcaaaaccttcctttatgccctgatgatcaaggagctttgcctcttcccttactaatgccttccactggatttggcatgaattctcaagtacagctgctaccaatcattcccaatctgtgggtgtcaccctgttaaaggttgcccatgaatgcaatagctgttttatgtatgggctatggagaccatatgagacaactgattctttaatattcttaagatccttcagctgtataagttgccattcataagccatctgtccatgagggtgtttcttagaagctggcttatctaccatgctagctggtacactaatgatgtatgagtaacaaccttagaagaatagtcacgatacctgggtggagtaggtgccttggattggagtgattctgcttctgaggcatcccaatgatctttaatcctaataatgttattcttttgaaaaaattcaatctccttaatcataaaagattccaagcacgttagtgaatctgtaaattgctctaactgcacatctacatgtttttctaggtctttaacacaatcatccttaagcagcatctggatggcatggaaactgccttctaggtatnnnnnnnnnnnngattccaggtcatgatttgctgattttgagtcctcagcaattgaccgtatggacctatgtaatctgtcagccctgtagtgtaaattatcttccaaacattcaaatctagactcaaatttgtgatctgctaccttggatgcttcaataattgattgaatggcattgtccaattcttcaaccctatcctggatattttgcaccgttgcatctaatttctgggtaacattgcctatctgaatttctagctcgctacagatattctttagctcctcatggtcttctgacagcctagcctctaaggcctcagacttggaggatctctctgtgattatctgatcataaatatgctgcatctcatcagacagctctgtctttagcatattggacacagagccaagcttatcatccaatttctgttccacttgctgcacaattgtggtctgacctaatctgttctccaaaacctcactgcgtaaagctgttttttcctgtaagtaggtggtaaggttatccttatccctattcctgagtcctctggctagtaacattatttgtaccaggaagctaaatgccattactgtatataggctggtaattggcagattagcatcctcctcaaacagtgaattcaaataataagcaaaattattaccaattttaacaaatgataaatattctgcataattttacctgatttctactccagatgcagtaaatatatttgaccagcacaggcgttcagttattccaaggcgtttggcagcagtcagtcagcggtggagagaggtcataaaagtgctgtgcttatcttagagagtatacggtcttgtggccgcaaccactgaaacagatgcagctttaccgcagcagcagccaagggaagcctctgctgaaagccgaggcctactcacctctaggcagctagaaactgtctctgagctgggtggatggttctgagcagctcagctgcagagggtcggctgctagccatgagcacctgcagagagagggcgctttctgggcctaggctgcaggcctggtagaacccacagcctgtcccaaatgggatgtagatttccaatatcccactcctgacaccggatatagtgggaaattaccatacggagtcaggtagaaatataagggtatttaatagggaaaagccttatttacagagcgacctagccagctggcgtggcagcagtctgtccagcaagtaccaaagtgaaaccgaaagagaaattcaagtcacccagtctacatcaccctgaccatgccctggaaggcattgtcagacacacctgtagccagcccctaagtagatgtggcttcgagttcccctacacttggtcttaatttcattggaattgctttaggtttctcttcatttaatttgatgttggcaatatgattgctgtaaattgcctttattatgctgaagtatgtccctcttatctatccctgatctctccaagaatttcactctaaaggagtgtttgattttgtcaatggctttttcagcatctaatgagatgatcaagtaggtttttaaatttcagtttgtttatattatggtctacattgactgattttcatatgttgaattatcattgtatctctggaatgcaggctatttgatcatggtgggtgatcttttgagtgtattctttatgtttacaagtattttgttgagtatttctgcatgtatgttcataatggaaattgccctgcaattctttctttgttgaatctttgtgtcagtcatgtatcagagtgattatggcctcataaaatgaattatgcagtgctccttctgtcatcattttgttcgatattaaaatgcctacaccagcctattttataggtccatttgcctagaaaacctttttctgagcctttattctcaggtaatgtctgtctttggtgttgagttatgtttcttgtatgcagcataaggatggatgctgcttttgaattcattatgttagtctgtttcttttagttgagaagttgagtccattgatattgagagataaatgattgctatttcctgttaatcattgttgtcattggtggttttatgtcattggtgggatgatggtgttagtagcagtggtaatggttgagaggttgtcgttccctttggttttgcttttatgagattattccccgtgttttcaaagctatatttaacttccttgagttggagttttctttctactatcctcactaggactggatttatgaatagattttatttaaatttgactttatcatggaatatattttttctccatctttgttaatgaaacttttgaagcatatagtagcatggaatgctgtcatagaattaacagaatatctgtctagattcttctggcttttagagtctccattgagaagatgatgtaattctattaggtctatatttatatgttacttgttcttgttatattgcagctttcaatacgctttctttattctgaatgtttagtgttttattatgttgcatggggacttttctggtccaatatatttgttgtcctgtaagcttcttatacttttccagacatctccttatttagattaggaaaattttcttctgatttgttgaaaacgttttcttggcctttgtgctagaattagtttctgccttctattcctattattcttagatttggtgttttcatagactcccagatttttatttaacattttctttgatcaatatatctatttcttctattgtatctcaagtgcctcctattatcctattctctcttccatttcttgtattctgttagtaaagcttgcctctgtagttcctgttcacttacatatatatttcgttaccagaattccctcagcttgtgctttctttgttgcttctatgtccatttcaggtcttgagctgttttattcaggaatttttttctaatgtaaagaaaatgtagttatttggaggacttaggccagcatggaaattttaaagacatttctggcacagccgtatctgatgagaatggcaaaagtcacaaagccagcacagctgtttgacaaatatccaataaaggtgggcaacatgatggctgccatacatactttggttttcatctccacctgtgtcatacttgggatacttttaatatttgtacaatttggggatagtggattgatgaaaaatttcttaggaatcagttaagccttctccaaggtatactgcttctaagcttctccagtaacctcctgaacatactaccccttccacttttagggagatattcatatctacttggtcttccttatacattggagattgcaatacacataaataagccagaagtctctttatgaggttatgagatattatcgaaagatctgtccctgtacttactcaggaacaaaataatcaaaacaaattcagttcaaaaaggtcaacaagattttgagcactagaggaggaggccacagttcagattacaatcctcttcatactatacactcaagaaattatttggcatacacagcaacaaagttagattagctggttacctctatcatacacagagactcatattgatgggcaaagaatgataaaagaataaaatataagtacattcctttcttagaaaagttagaacatgcagcgccactgtggtgtcataagaccaaggaataacagaatgccaggattagacatatagacaaattccataaagatacaaaacacaaatattgtattacaccagaatttgaataataactgcagcagctttggcctgaggatttttcttgggcactctgactattaagagttagtaatacactgtaagggacatggcaatgtgcctagattagattggagattttgttttggcctaatgtccttatagccacaaaagctaccaaccaaattgggttatggggttgataagtaaaaatgattataaaagataactctgtttatcaatgataacaaaacttgaaggaaaattattggaaatgttaactctgttctgttatagtttattaatgatgactaaaagatgagcaatgaaacacatgtacaaaacaaaaatgacactatctatgttttggaacagtatgaatctatccatgcttactaaattctataaataaagaaccatactgactgctagtcagtcaggctgcaagattttcctgaccattgtgacctagcttatttctttccctcaccacctccttacatcctttgctgggatctgtccactgatggagatggctccccacacacttcttaagtgcacatttccaaattaactccttaacacaatattttaaggtacatgttagccaccccctctcttagagaagcctgcacacatgcagtcacatgtgtcctttattctcaacccttccttctctcctcatactcatgttgaaacctatctttgcaatgtcttactaaagaatcaactctgctttataaaaaagggccaaactgcaagaatggtcatgaaatttaactttttattatttaaaatccttaaatttaaatgtttctctatctacttttgccttcccaatgtttttcaaactcctctcctccttccaactaacctgattaaattctgtctcagaaaaacaaaaagaaaagaaaaaatccaatacaaaagcaactacccccggaaaaaaacaaggtaacaaaataaaattccactcaaaaattttaaaaagcaccaaattgttgccaaataaaaatgaacaaagtacttgtggagtcgattatatgttggtcaactactcctgaacatgccatgaggcctgccctggagtggttgatatacccagtgtcattctactggagaaaaccaattttctgtctctggcagatataagtgacagtgcagttgtgaacctttactcttgtggctaggttctcattaaaatacaatgcatttcaagttaataagataaagcaataattatcacataaaatttagacaagacaaaccaaagaaggaaaagactccaagaaaaggtacaagaattagagacctgtgcatttacatactcagtaatccaataacaatactaaacaagaagccataatataaggaaaggacctagtgcagacctgtgcaggccctatgtatgctgcttacatttttatgagttcatatgagctttgatcatgttgatttagaaatccttcgtttcatggtgtccttcatcccttctggttcttagacttttattttctcctcttctgcagaattccctgaactcggaggggagggaatttatagagacatcccatttaggtctgcaaggtccaaggtctctcactctctgcatagtgtttggctattggtctttatatttgttcctatttgctataggagaaagcttctctaatgatagttgaatgaggcacaaatctatgaatataataaaatatcattattttagcccagtattattgtactggttgtacccttgtaccctgggctatataatttcaggatcttggtcacccaagcaatatcaggtatgggttccatctcatggagtgagccttaagttaaatcagatgctgtttggttactcccacaaattttgtgccaacatttccctagcatattttatatgcnnnnnnnnnnggaaaagatttgtgtttgggttgatgtttatgtttctcttttggtgccatgcagagaacttcctgtaccaaagacactggaatataggagtatgggctctatgtaggaaacagcttgacatctccatgtttcctgagttgtctacgtgttatgttcagcaatgggtcttgctgttaattcgcggaaacaaacctatagtctttgcaaaaccatgggttctttgaggattcccattggatgcctctgactaagagcaaaattagatgtcaccccaaatagatttaaccaaatcagggtactgcgagcttcacttggtgacaagagatggccagttggggttctgtcccatacccccattattccccaatatttgcaaatttcattaagaccacattcaagagatttctactccattatgtttccatactacaccacaagtgctcctcaattttagctgactctccctgtatttcttcccacaaccccctcttcaacccctctcctcaaatgatcctaccattcaagcctcccttccatccatatctatctattgtatttccctttcacaagacctttgtgatctctttagtcccttactctatacctatcctctgaggctccatggcttataacttgattttcattgataatataacagataatatccacttttaagtgaatacataccatatatgtctttccagatctgagaaacttctttcagggtaattttttcctagttcggtccatttgcctgtaaacttcatgatgtgatttttaaatggctgtgtaatattctattgtgtaatttaccacatattctttggttcagagacatctaagatttttttttcaattcctggctcttatgactatagaagcaatgaatgtggctcattttcttgtcatggcagatgctgtgttgtagaatcaagaatcatttgtgtatatgtccaagagtggtatagctgggccttgaagtagatcaattcccaattttctgagaaacctctatattaatttccaaagtagctgtatagtttttcactccaaccaccagtgaaggagaattacccttgctccacatcttctttggcaccaactaccacttgtgtttttaatcttagccattctggcaggtataagatggaatctcattttagttttgatacacatttccctgatggctaaggatgcagagcatttctttctcagccacattattttttctcttttgagaattctctgtttaaatatagactccatttaaaaatatttaacaaatattaagatatttgtttccttgatatttagtttcttgagttctttatatattttagatattagaggtnnnnnnnnnnnnnnnnnnnnnnnnnnnnnnnnnnnnnnnnnnnnnnnnnnnnnnnnnnnnnnnnnnnnnnnnnnnnnnnnnnnnnnnnnnnnnnnnnnnnnnnnnnnnnnnnnnnnntggtatcctttgttatgcagaaaattctcagtttcacgaggttccaattattaattttgatcttagtgcctgtgctaatggtgttttgttcagaaaaatcttttcctgtgcaacgtgtacaagtgtatttaccacttttatcttctttcagattcagtttttatgattttatgttgatgtgtttggaccacttggagtatgaatctatttggatttttcaacatgcatgtatccagtttgaccagcaccatttgctaaaaaatgcctcctttttcattgtgtatttctgtaatcttcatcagaaatcaggagtcagtatgtgtgtgtaattatgtatgggtcttcaattatatttcattaatcaacatgtctgatttgtaccaatatcatgctggttttcttagtatgccttgatagtacaactccaagttggggatttgacacctccagcagttctcttattacttaggatttttaactatcctttttgtgtgttctttatatgtagctgataaccagccttttaagatatgtgaggtattgtattgggatagttatgaagattgcattgaatctgtagattagtttgagtgtaataaccttttttacaatcttaattctactgaaccttgagcatgagagagccttaaacttctgatatcatcttcaacttctttcttcaatgacttcaattttttcattcaagtatttggctttattagttagagatacccaaagatattttatattatttgagactattgtgaaagttgttgtttccttgacttctttctcagagtaattttttgagtttattttgtggctagctatttttctgaaagtttttatcagctgtgcaagtttcctggtggagtttttagggtcattattgtatacaattaatattgatctgcaaataatgaaattctgacttctttctaatttgtaacgccttgatctccttcacttgtcttattgctgtggctaagaattgaagtattatattgaatgggagtgggaatttgaatgtaattgtttcccttaagcttatagggaatggcataattaggaagtgtggctttgttggagtggatatggccttggtggagaaagtatgtcattgttaggggtggactttgaggtttcctaggctccagataccactaagtgccataattcacttcctattgccttctgatcaagatgtagccagcaccatgtcttcctccacactagcatgttccctgttttgctgaaaaggggctgtacctctgacctttaagtgagccaccctattaaatattttcctttataagtggttctgtcatcattctgtcttttcacagcagtggaaaccctaagacagaagttggtaccagggactaggatattgcctcgataagcctgaccacatttttgtttgaagaaatttggactgtggtactttaggttaggaaagtagtagaatttttaagcattgtttaaagaatgggtcatacttgtaggatcatgggagacagtgatgataagagttatttgatcaattggggattagctgaagaggtttcagagaagaattttagtatgttgcctatatcattcctgtaatatattgatgaagaatatggctgcctttgcccttttctgaagagtatgcttgaggctaaagcaaaaagttttgtattaattccattggcagggaaatatcagcagcctagtatagactccattaactaagatttatcatgaaaaggaacaagctgagcaaataaaattttaaaaaagtacagatagagaaaagtggcaccaggaaataaaatagagataaatcctgtgttcaagggtataaacagattaagaaatggaataaagggaatggtgacttcaggaaaagttcccacctagctaagtttccaacctgtgaaaggagactaaagaaaagattagagccaaataaggtggtgtgtacccttaatcccaacaccctgaaggcagaggctgacagatcttggcgtttgaggccagtatagcctagagatcccgttttagtaccaccaagcttaggcagggaaaaacagaaatctggtaaagatgtaactgaacgaggggaccatgttccagttccagcaaacagcagaagttggcagcttcagcaacgtggttctggaggtaaggatagcagaaaggggttatgcaattttcccgagactaaagaaaaccactgagaccgggcatgtgcaagcattctcagaaaatctgctaataggatttagaaccagccccagtggtaatagtgtgttgcagtcaacagaactgaagggagttgatgatctgaagagtattttgatgtttggttttgttttgttttgtttttcttcagacatggagatgcagagtttggaatttgcccagctgggtttggtctttttttttttttttttttttttttttttttttttttttttggtccaatatttcttcactattctcccttccatatatattggaatggtaatgtatttcctgtgccattacatgttggaagtatgtaatctgcctttttatttggattctatagggaattggagttagattacatgaatctcagaagagattttgaaatttaaacttttaaacattattgagactgtgatagactacggggacttttcaagttgaatgaaatgcattttgcatgatgttattgtcacaagcttatggaggccagggacttgaatgtggtagtttaaatgtaactggcccccacaggctcatatgtaccgacactattagtaggtttggccttggtgaaggaagtatgtcacagtgggggggtgggctttgagtttcctatgctcaggatacatactgcccagtgtctgagtttacttcctgttgtcttctaatcaagatgtaatcagtaccatgtatccctgcacaccatcaagctccctgccatggtgaaaatggacggaacctctgaaatgtaagcaagccacccaaattaaatgtttcctttataagagtttttatattgtcatattgtctcttcacagtaataggaactgaaagacaataggtatggaaagaatgggcaaccttgtcttagctctgaatttagtgagtttgttttgagtttctgttcatttaagttgatattggcatggactttcttttgtatgttggggtatgtcccttatatctgttatctttccatgacttttatcatgagtaggtaaagaattttgtcattagctttttatacatctaatgagatgatcatgttttcttttcttttaatttgcttatatggcagattacatttattgattttttttatatattgaaacatccctcctgaatctatgggatgaaatctacttgattatggtagacggctttttgtagatggtcttcaattcggtttaagtgtattttactgaacttttcccatctatatttgtaagggaaattggtctgcagttctctgtctttgttggatcagtatgtagtttgtgtatcagagtaactgtggcatcataaaattaatgagaactattcctttggtttctatttagtgaaataatttgaggagcactattcttatcttttctttgaaagtctggtagaattctgtgctaaaactgtctgaccctgggatttttgggggtgggtgacttttaatgattgcttcaatttcactaggaattataggactatttaaattgtttatctaatcttgatttaactttggcaagtgatatacattaagaaaattatcaatttcattaaaattttctaattttgtggagcacaagtttttaaagtatgtccttatgattctttagattttctgattgtctattgttaactccttttcatttctgtttgttagatattttccctgtgttttttttttttttttttaattttgataagagtttgtctaccttactggcttcctcaaagaacaaattcctggtttcattgattctttatattgtttgttttgtttcaattttatttgtttcatccctgagtttgaatatttcctgtcatctattccctttgggtgtgatttcttcttttgttctacagcttttaggtgtgctgttctaataatagtgtgatatatctctatttttttagtttacgtacatccttagtggtatgaatttacctctaagaacagccttcattgtgttccataaatttgggtatgttgtttattcattttctttgaattctagaaagtatttaatttccttcttaagttctgcttgacccatttttcatttagtacagacttttgtagtttccatgattttgtaagcttcctggtgtttctactgttttaatatccagcttttattgtgtaggtcagataggatacaagttgttattttgaacttcttttatctgttgagactttctttgtgtctgtgtatgtggccaagtttggagaaagttccagaaggtgctgagaaaagcacatattcttttgagtcttggtgaaatattctataagtatgttaggtccatttattttataacttcagttagcttcagaacttctctgtttagattttatctggatcagctctctattgccaagattggttggggtgttgaagtcacccatatcagtgtgtgagggtcaatatgtgatttaagctgtagcagtttcttttataaacatggatgcccttgtgtttggggcattgatgttaagaagtgaaatgtccttgagattttttgtctcttgagtatgtcatattcttccttatctcttctcattagttttggtttgaagtctattttgtcagatggtaaatccactacttcagtttgttcttagggctattttcttgaaatatctctttctaatactttaccctgatgggatatctgtccttcacattgatgtgagtttcttggatggaccctatttttgcccacattcaaatctgaaaaatttaaaaagtagttttctacatggcttactaagattttaaaaacacctccactctcaaaagaaaggaaaactttgtgctccttctcttttgatttttgagaaagtttgtttactgagccctatatataaaagaatatataaagcatatttattaaaaaagagtaatgaaaataaccagtaactatgcaaaaacagcaataacaacaaaaaaacaataattatgcaaaagagggcagtagcaggctaaatgtctcctgagaatctattgcaatctcagggacaccatgggggaaggagagaatcagattccataagttgtcctctagcattcatgaatacactcacacacacacacacacacaaacacacacaaaaacacacaacacacacacttaaaaaaaattgtatttaaaaacacacaaaacactaccatttgcaaggggcatccatccctaccacaaagaagaaactcagtactgtatttcttatgcaagtgattacgaatcacattgtgactatatgtgagtaacacacagcttttcttatgtgaaaattatattcccctctttattgttttgctactaaatcagcttgttacattacatatatttatatgtttattgtatctctggtacaatgcttgatttatttatgccactggaccatatcccattgtatagctatgcttatttttttcatataatttcttacaaatgaatatttttcttatggcattttttattttctaatctaggtcattataacttttttatacttctgaaatcttgtagtaaggagtgttttccattcagtattattctaattcctctaattactactgttttttaaaatgaatatatttgttattgatcatcaaacacagaagtgcttattcatggtttttctctatttaattgaaattattgggttttagctcacattggtataaagatgtatatcatatacaaatatgtaatggaaatacatatgaaaatcctactctgtgtacagataatccatatttggtgctgtaatgtgctaaagatattggaaattgattctgtctgactttattaccttctcaaggcttagtaattggaactattaaatgacattatcattaatatagcatcatttttactttttgtgtgtgtgtgtgtctgtgtatgtatgtttggtgtccatgtgtggttatacacacacatagaggtacccattgaggccagaagagggtgtggaaactcctggagctggagctggagttagaggtaggagtaagaatcctgctgtggtttctgggaacttaattctgatcttcaatgggagcaagagagatttatctactgaacaacctctccagactagtaaagtgtagtttatcagatactttatttatggtttatgttgtttgagttttattagtttcctgtcataatcgcgtaatgaaattcttgttactttgtaaaacttacagattgttggtattatatatttagtctcatctgcctgaaattggtacttttggtataaatcaacataagcaatttcactaatacattattaatggctttaattaataagctgccatatgcctccaaaatcactgatctgattgaatgtctcatagatccctcctgggataatatatcactttccttcatctttaacatgaacctaatctggtaaacaggctctaaatatttgtcaaatatgtgctgataatactttgacttttctgtaaaattctaagaactaatattgccctgatactctaagcatggctgggaagcattctagtcatagaacagtttttgcctgaggtggccaattttatggctgattggccatgttccgctttcttatctgttccctcagaagtgtctctaagcacccacagcctgcagttccttatcaatgatttcagctatctgatgacacctttttttaaatctgagactatttttagtccctttttttttagagaatagttagacttaacattcttataaccaaagttgtctttaagctttccagtattttcattttagattattttaatgctatatttctgttattttttgaagtaaaatatcaaggataaggcatgcatgaatttaaatatattggggtcaacctatatacaaataagagactgaagaggtagtttagtggttaggagactgtttggtatgctgaagccctcaggggattcaagcactaaagcaaaggaatgcacaaacaatagaagtcttttcactcaccggccttgtaattatggcaccaccatcaaaatatgtccatcatcctcagtgagacaagaagtctgtgagctaacccctccccataaggtgaagcttaattgcagggattccattgtgagaactcagaagcctgcttgtgctgaagtatgctacatatcctaagattctttcagccacaacattgctgttttgtgttgtataatgccaatgccccatgggttccgtctgcccactcgaagatactggggatatataagttcaaaatagaaaaagtcaggcaatgtgtatcatattagatatatacaacaattggtcacaggaaaaaccaagaggtattcactgtttttcacacctgaaattggagatttttgtatatttataatgcacagaagctgtgttttgaaaagcaaatattatccctctctgaatagagaaaattcatagcacagtactgccactgtgacagatgcttgtttatttactgaacctcaaaatgtcatcaccatcatttattttactttgcatttttattttactttctttatatttagtatgctttcattgctctattttcttgagatacttagaatatagaatttaataattatcttcactataaatacatatacctcaaacttattttcatagacaatttagtctatccacaaatcttaaaacaatgagcttgaataaattcacttacaaatactttttcaatttgattcttatttctttgaaatatgtgaaacatttaaaagtacattcatttataaatacatgggaattttaaaaaaatttattcagtcaaagagagggaggagggattatatgagcaaggggggcaagattatgatggggaagcccacagagacagctgatctgacatagggggaactcatggactctggactgacagctggagagcctgcatgagaaaaaactaggccttgtcattttgggtgacagttgggtgccttggtctgtttgtgggactcctgacagtggaaccaggatttatccctggtgcacaaattgtccttttagagactattcccaatgatgggttaccttgctctgccttgatgcaggaggtaagggaattgttgctgcctcaacttagtattccagccttagttgacttcctataggaggctgtaccctttctttggagtatatggggttggggaaagatggagggagaatgaggaagagagggatggggacttctggttggtatgtaaaatgaataaaacaattctttaaaagaccccatgaacatgggtgtcagtgaggaagccttgaaaatctacaggtcctcttatagtagatcagtacttatccctagtataggaatggactgtgggagcccattctacatagagagatactctctgagcctagatacatgggggagatcctaggccctatcccaaaggatatgacagactctgaagaccccctatggaaggcctcaccctccctggggagcagaaagggtatgggataggtagggtgtaagttgctgggagcaggaggaggagaggagggagaggtaactgagattgacatgtaaaacaatcttgtttctaatttaaaatttaaaaactggagaaaaaaacaaagaaaattcattgatttttaacttaaacatggctaccaaatatatcatcataacttaagtcttttatatttaattgagtcagattatatacaattatcccaatggaactgaaaataatgagatctttgcatttgaaggacatggagtcaaaggtagattagaccatgatgattattgactgtaacagtcaaatttgatgtcttgttacctttccttcttattttttccccagtgagtttgtgaaaggaagaaaaatttatgcaataattataggttagtgtaatcttttattttattttactttattggtttttcgagacagggtttctctgtgtagctttagagcctatcctggcacttgctctggagaccaggctggccttgaacgcacagagatctgcctgtctctgcctcccaagtgctgggattaaaggaatgtgccgaatgcccagctctaatcttttaattaggtatttttattttaaaatttctaagtctattttattaggtaaataaattgtgagctttcttgttgaacagaactcactatcatgaagtcttctttcttgcctgttgtagtcatgttctactgctctgaatatacatcatgaccatggcaactcttataaaggaaagtgtttaagtgtgactggattacagatttagaggtttagtccattatcatcatgacaggaagcttgaccacatgtaagaagacatggtagttgagaagtagcttagatttctacatccaaatcatcaggcagcaagaagaaagagactctgagactggcttgggcattgaaaactccaaaacccacgcacaaggccacacctacccaaggccacacctcctaatccctcttaagcagtgctactatttaacagccaagcatatgagtctatggcagccatccctatgcaagccaacccactgtctctccatctctagcactatatagacatagatatatagataaagatatagatatagatatagatatagatatagatatagacgtagatgtagatatagatatagatatagatttatgtactgtgcaactctctcatcctttgactttcaatatgttgattgcttagatgtgtctctcaatagccaagacataaatatttttcattgtattttctggatgtttctaaacactttgtacaatgaatatttttatatttattcctctcacttactaacaagttaacatgaggctcatgcatgtactaggtaatacattcctgaaatgtaatacattgtcatcacgtatgtttttatagctgtgcattttatttagtctttgatcaacttttatccttaagtaaacacatttgcctcattagttcattttgtgatttggcaattctctaatgtgtgccttctaatgttccccacagaacattagattcatcactatgtctctgtgtgtggtccaacagtaggagtggcttatagaaaacagcatagctctgaagaacaagatcctgaagcaaagttccacttttcacacttaacatttgtgtataattgggaagctcattgggtcccttcatatttcctccttcatttataaagtaggctatgcaatgatggtcacatttttatagtgttgcaagtaccaaacacactaatatataaaatgcattccaaatatgacctgacatatagcaacaatttcaagagtatccacataaaacaatgaagtgttaattttttgttgagatcttagctattcattcttttatgataggctacctccctgtcaggtccacaaatgagattttgaccaacacattctggaagcctctctgccttcatgctattccatcctttaatatactaccatattttttttacatatatggctaaactcttgatgtataaaacacaatttactatcacatcactgaaaagtaagtcctgaacatataagttgcaatatgatataactagacacagctactttgaaacatttgaattataattgatctaagttatactctccagaatagtctaaactttgaatgtttaattctaaaaaagaagaaaaatataaactgtcttactaatgcattttgggttggctccatgttaaaattatatttgagatttattgggataaatataattcttatgaattgtttcttttattttgttacatatctaccaagtaacttagaatgacatttgtggcttatgctgtagctctattgagtgttacaggcttgcaaaaattatggtatccaaatctataggttcttggaggccctaatatataatacacacttaattcattttatgttatagtaagtatttcttttacattgacattatgtcttcagagatcaattcttcaggacagcaaaggcaaattctctattttcgtttaattttttaattcctggtataccaaagcatagcaaatgctcattgtatttgccaagtaaaagtgataatacactgcattgtttcagtaaaataaacaacaagtttattttctagagatatctgactaaaatttgatagacacatgcaaaaagatcccctataaaattatagttcctgaattacaaatacaagtattaattggaacagaattctttgagtcttgctatagagatagtgagtttgatttcctaaaaatacatgatatatataatcaaaagacacaaaatactaagagtccttgaccatagttccagagactggtaacaactggtggccactgggacccaccctccccttcatcccctatttagtatataacagacttgatcgattggtagacacttaaaatagcatctgatcttttgtttgagataaagaatctgtgttcttttaatttgttctgaagcatgctattccctagcctttttgatcactatcagtgtaactcaatttaacaagccttctctgtctgtgaggagtgggctaagttcttcagaggacttcaatggagatgaacatctagcttccaaaagcttacaatggccacagggaaatgggcatatacatgagtcttggtgcagatcccaaaaagaactagagttttacagtactaaccatagaagcaacaggggttgaggtgaagggtgtccctgtacttgagggctgcattaataacagagccagatttaggggagatggatttccttcaagcaagttctctgtcctctgaagatgataagacaataatagttcacaagaaaggatatcaggaagtaagcacttcccaaagcatgtcgtcctgatgttaaacaccattcacatattttgaacaactgttacatgatagacactataagccaggtacagagatgtgatcatgataaaacacatcccatttacaaaggtgaaaattcagatgagaaataaatggaaatttgaagtgtcctgtaactagtataagccttaagagctaatatatgggaggttctttattggtgaacaggatctgggctgttatttccaggcttggtctcttactcaagtggaaacaaaggttctcacaagttggataattagtgacgaaacttaactcaaagcaaaactgtaataaaggtttggaagggataaagcatcaagattggcagtgggtcagaagaatgattataatcaagggcctcagttatcttctgtaacctcagtcaatgcagttcggagaaggaggaattttgttatcaggctctctaatttgattgccaggcctggattacctgagcttttgctcactgcccatgtcctttcccacggtgcatttcattgcaatcatatacatgttcttttataaataggcatactatagcatagagagtattctcccttaaagttcacttggtgatataatttccttggttgcacttgcactcaatcaagacagacggggccatcctcttgtccaaagttcctgaatggcaatccaggatttgtttgcacagaagcagggcatctacagaggaatgctaagattattttcattttcatttcattttctagagcaggtatatgtgcagctggatgcaggtgggggccaaggatgctaacagggtcttaaaatgcaaaatggggtgagaggactcacagattgctaagctatgttttatgcttatctgtttcagggagactacaggggcaatattatatattgaaaacttactaattgcgaatatttcttgtggtgttaccacaaaatctatgcaaatgtggaaaggcagtaggtatgcttaacaacatgtaagtttatacagcaataaaataataatacttgtatttagaacaagtaatataactatgtttcttcttaagtccaaaacaactaagagatataaaaatagtgtaaatactgagaatttctgcttcattgatttttgtttcccatgtgtcttttattcataaaagtgaagcaccatataaagcatttgtttttttaaattaacattctatgcctttttttcagtgtctattgacaacttaactgcccatactatttagacttcaaaggagaaaattaaattctcaatagaatattttcaatgttatcctggccaattcttgagtaataaggaaacacctcctttctcaaagcaccatattttcctcagtgtttgcactgttgtctgctttcctgccatacccatgaccatgcactctgatgtcccagaaaaggctttctaagtaaggagtcttaggaaattcacccactctaaatatggtcaggtcccaaccacatctactcactgcaagaaaatatattagaaaacagactctcatctcagcccttctgcagtgtgttgtgcttctgttacagctactaagaatgctttgagttgccatggttagattgtttggctactgtcaaaacgttgactcctttgatttccctgatctcagactaaagatctctagcaactccaatcataaacaaatgtattcaactcatagattgtactatcaagtacaaatgataggaaacagcttagtattcggtgtcgtggtgatgaataattctgttagtgtgcttggatagagaaacaccaggagattgatacagcatctttcagcatgtatctgttacggtgtttcccaagaggaatgattaaagtaggaatcttgaaagtatcatcccataagatgggccccacgtggagatatggaagtagggagaagaagtgagaaccctcagcacaggttctcgtcctcacttcctccacccagccctttcaatggccacttacctaagctgctctgttcttcacatcactcatcccagccataagctaaaacctctgaatctgtgaaccaaaacatatctgttcttcctcatctgtcccatcagttgttacattataggaaacagaaagcatggatgtggctctgaccctgagcatctcaggaaacaaagctgcattgagaagcaccaatgactaatagaaatgctgcaaagtaaatcatttcaaatctggccatagggatcagacaaggtcacaaggctttgtgacataatacctgtaatagtctgctgatctctgtatcacatcaccttcagaaggaagcatcaccatttatttacatttgaaagcactgatgttattggcagcattaattttgtgaggtcctcaaattataaccttagatcatcctcaaaggtcgtaaggaagtcatagaactgtatttgacaagacattgaacttgtattatgagccacacactattctgatattttatacacatttagagacctataattagtatctaccaaagagaacactaaggcaccaaaatcacattattgctttttactcactatcatggagctacaaaagcaaaaattttattgtgaaacaatagggttaaaaatatgctttaaaaccattcaaagatgttgtcttttgtagcatgttagctaacactgacccataagtgttttgagttatatatttcctacccataaagtaattgccataaagaggattctctctgctataatgttataaaaattaaagtgtgtaaggctctaggttgagtgtctaccaagtccagtgtgtgtttgttgaggacatgaatccttatctcagagaagtccttaccagggtgattcatctgaggcacaggctgtaacagatatgctccaatgtttcctatagtctagaagaatctggggagtcttgcatgtcatgcagcaataatgaaccctgcatatgagtgcccctgggcttttccctctgtagattacaccaagattaagagccatgtttctgtatctagaaaatattacaggtgcccgagccactatttatagcttcacaaagttgccaatgtgattttctacaacaaacatgtcaactccaatgccttgattatgcaggtacctagcagagagacttgtgcaacgggttatattagtgcctctaaactcctttgggacacatttagaatactgaattctgtcaccttgaaatactttttccacatcaactcaacttcctctgcatggatctgagggaattggcattttattcataacttatccatatgggcaatgatcccattactcttcaagatggaaagggaagccaaaaacacatgtaagtcaaaaacttgtcctttgacaagtttcagtgctttggccagaattagatcagaacattgagtcccaggaaaataaattactgtttaaattatttgtttctttaaaaaaggaaagatcccctgtcttccaacttactttattttatctctttaaatagaagcagctccagcagctgcagaaaaagatggtggccctgaatgtcctatctaggtgtcaagattaagggcactgagaaggcagtttcatatgaacatttcttatcagaaaatgtcacttgattgttcctgaaaccaaatacatcatcagtatcccacaatcttctgttcacactgcactcagtatggagaatactcaaatgccaggaagaaaagaaattttatgaacaaaaattatgctcaccaaatccagctttggtaaaactttctcactgtagtaaagagattatatctgtcaatcacatgattgtgaacttctttgtagaacctgtgagagaaatcagatatcctgactccaagccattccctctccaaaatcatgtttcctcttttatttacagaatgcttaaaatgtgtcacttttcaagcagagaatgattcaaaacaataagggcaatcatagcacctatctatggcctaaaatgccagttaaattagtgacactagtataaatggcagataaagaccaagtaagatttcaggaaacccaaaacaacattgttaactctgtgaggctggaaaaggtgccattttgtaaagggaaggaaattgtacagatatagcccttcagtgaggaatcagtgggggactgaaagcatcactcatccctgctactgacagtcatgttacaactcaaccagctttggaagtagtcatatatacttgattctgtattcactttagaggttaggaggatggaatcagaaaaacttgctaagcatggcagcatgtgcacagccttaatttgttctctgtggttatatcttgtaaaaatttaaacttcacctactataaaaatatctgccaccaagagtttaatgtatctgaggtctatgacagtaatcagacattctgccagacaaataaaataatacaatgttctgtcaattagttttaaataatcccagagacttcagaaagatcctcgttggagctattggtttatttgcttctaagcttgggagagatgtcggtgtgtgtgtgtgtgtgtgtgtgtgtgtgtgtgtgtatgtgtgtatgtgtgagtgtcatacaaccaagctctgtttctgtgtcaaacagtgacttactgctttctgaaccacaatctccactttcataaggagtaggaagcaagaggctggagagatgtctcaacagttaaaaacacttgctgttctactagaggacacatgtttggttcacagaacttacgttgggtggctcacaattatctgtaactccaactctatcttcaagacatttgacactcccttgttgcctcctgcagtaacctgcactataaggcaagcacacacacacacacacacacacacacacacacacacacactaaaaataatgcttttaaaagagaacccaaacaaaatctgatttattgccagggttttttaaaattatgaatatgaaaatagttaaaaattatagtgctattaaaatgctatgtatttctgttgcattgtatagagggaaatgattcaaagctaattaatatgtagcataaggaacacctaaaaagttggggagtagaatcattcattttaagaaaacacagtctctctcactggtctgcttgttgtgaagatacaggactggccagtggggcacagatgctgtgattcctgtgttgtagttttccacacatcctgcagcagactgtggcactctggaaaatgaagtgagggccatatggagaatggctgaggaaagtactgtctgattttgaatctgcccaggccacttttcctgaaaaatggaaggccaaggtctcttcaaccctcaaaacccaaaataagtatagctaaaagaatatactaagtggcttttgttcaccattaccttatatatgctagctccaaggccccattttaataggcaagtctctctcatagtgaacaattacaaggacaatgacattgattgtaatttgcaaaagtgacattttacccttggctgtagatggtattttttggaggagcccataatgtctcacacatctccaatcaatctgtgacttgtgtctcatactgattaacagcatcccccttccctgtctgtgacctcaacataaaagaggccatgcaaccaacttcaaggacatacagaaaaaaggagcaaaacatgaaaaggccaagaaataaactcttatacctgtgctggatttctatgagactctgcagttcagactgtgtgtgagtgcatgtgtgcttgtgtgtgtttgtacatgtgttcatgcaggtctgaacctgcatgtgtgtatagggggaggagaggaggaaagcattgaatgagtttagtagaaggtagtgaacggacacagaaaaggtacagaaataaggctgaattcactttgtatgtttcagtaccctgcctgtgagcagtactgcttatactatatcaactgtcaattaggctaatgacctcatgcaaacttactttgatcaacattctcttagactataaaatcttacttttacctagtcatgtcttacattaaagaaatatctgaagtataattgtttcatttctccttaagaagattaaaaatgacatcattaataagtcaaatgcaattttagttagtatgtctttaattaaaccaaacaaactttcttcgcaaagactttgagttttccttccagtccctccaggagaaagatcaacatccaatgcttcagctcattaggttgtgaagtttgaagtgactcaaacaaaaagcacattcacaatggcaagttaatagctcataaatgaaattcctcttaaaaccaaattataagcgacattttctgaggtaagcatttttaaaaatagaacacatttgtttctgtaatctcatgtagatgggcacattccaacaaagaaatatagctgaagcagaccagagcaatcaggaacaaacattcatgcagctgcagcttcagcatctctgtcaatgctattttctcttatgtgatagccagttttatgtcaacttgacacacaagaacattattttggaagaggcaacctcaattgaaaaaaaaaaaaacccactagattggcctgtgggcaagcttgtggtacattttcttgatagatgatcaatgttagcagaactcaaattagtgtagtaagcagaacccaacatagtgtggatagttccaccctgggctggtattcctggctgctataagaaagcaggctgaatagaccatgaggaacaagctagtaagcagcagtccttcatggcctcttcatgagctcctgcctccaggctcctcccctcttgagttcctaccctgagttcccttaatgggaaactttgatgtgataagcttaataaatcttcctccaaccccaagttgtttttggtcatggtgttttatcatggcaatagaaagctagctgagatcccactagtcagaatgccattgatttcacatgtgcaaactcacaacctgggctaatgcagcaaaaaagtccacagagtgcttgttttttgatgggtggtgggggagagcctctttcaaccctacattcttcttttatagttaattttaattcagtaagggaggctgcaaggcctagaagaggcattacaatgacagtgcagcagtgtatatcacagattttatcaacattttcttcaaaaataatgtctaccaacttgaagtggttcagcattttttgttccatttccccatatatgccattgggtcaatattaatacatagaagataaatgttcattaagctttaagagattcacaccagaaaacttgtatgtatgatccagaggctagactaggtatgttatacttgccaatgtttaagatgagactgctgcattgcagtagtctgggaaatggatctagagatgagccatcttgaacattagcatcccaggtactcaggaaggtgctcaaactatctaaccacctttatccccctcatgaagaacagcttatgtgatctgctttcacctgaatttattgatgtgcctgccccaggaaattcctcttgccagcttatcatgacaatccactcattcttgtcattttggcctgttactgtccactccaaaacaaagcttctgttacaagaacagactacattgttactctatttgaataaacattatttagatagataagcagatcatgtttatactctggcataatggggaatgtatactatgccttccagtcagggaagatcacagaagaacaacaggaacaaaaggaactagatctgtacttctgtgagaaaaggagcccatgtagacatggcaagggcatagactcagatgctgttgtatctagcacaaaacttccacaagattaggcccttaaacatactatgtgaagaacagaaagactcacaatgcctctctgctctctgtggatctagattaattaatggtttctgaagaagaaaagatactttcttctgccatgtagctaatagtaaggtgttcatattcctgtaaataaccatttgtccatgcttcaaaaagtggcaccaatgaaactcattgggtcacaaaaataggatgaagatatgaaaggaggagggtgatttggaaagaagaagaagggtttcatcagtggaggaagggagacaaaagaggttaatgggaataaatatgatcaaaatacattacgtgcagatctgagaatggcattgcaaattcattattaattggagtattaaattgcatgtacaactagtataagcaaataggaatacacaaaaagtattatctacacattgtggcttatgcttataatcccagcacttggaagaatgaaaaggcagactacagagagactgagggaagtcaggcctgcagattgagccactatctaagaaatcaatatcaattatataaataagcactaaggccgggcattggtggcacacgcctttaatcccagcacttgggaagcagaggcaggcagatctctgtgtgtttgaggccagtctgttctccagagcgagtgccaggacaggctccaaagctacacaaagaaactctgtcttgaaaaaaccaataaataaataaataaataaataaataaataaataaataaataagcactaagtatgacaccaaatgataagttggactcttggggataaatgacaagaatcagaaaggcactgggcattgtggtgcatgcctgttttcccaggtactagggggatattaggacaagaggattctaagctcaaatcctacctaagactgtcaaaataaagtttaaaaggaaaacaggttgaggatgcatcagtggtacagaacatgtcaaaataatagctcaaaggaaaaagagtctgtgaatgtattggtgctacaaaactggcctaaaggaagcccaagtgacagtcatcaaagtgaaaatcagaagtaactaataagcatattaattaaaaaggttacaggccacagagatgattcagctattgagtacttataatttttctacagggctcaagtttgggtcccaggatctatgacaagcagaatacaactgcctataatgccaggtccaggtccaatgcctactcatgtgtacctattacatcagatatacaacacacataatccacaataataaaacaaattataaatattgtaaagattactatttcccagggaagctgtcttttttgtagttttacaaatgtgttctctcttcttcctgcccccaaactgagctcatgtcttctgtcaacatcattctccctctcagattctgatttttccctctatttccaacccatatactcatattgtctttgatggattgagctttagtttagtaaggaaatttagaatagggaactctcttgctatcaattttcccttttagttttcagatcaaacctttatttttagagaatggttcacaaaatacagcagtaattataggaatcagaactaaaaatataaaggaatatatatttcagtggattttgtatctattcacccttggaaattgaccttcacaacatttagaacctcttatttccttcctaatgcagtttatcaattctgaaggagatagcatgtaatatatacttcatgtcatggtggctcctattcatttgatttaactttgattatatattcctatgataatgtttccacagtctaaattttacgaaatttacttctagggagcttgaaaactgtattgctatataaaatccccctttgttctatttagtactttagtctttgttgtagtgtgaaagagaatggtcctcatagattgatacttttaaatgtttgatctccagttggtagaactgtacaagaaggactaggaggtatggccttgttactgggggtgggccttgaagtctcaccattcccagttctctctctctctctctctctctctctctatatatatatgcactgctccagtactttgcctaactgcctgctgccatgtttcccactgcactggtcatgcactctaaccctctgagactgtattgcctataaacaacacttgattttatatattgctttggtcataacatgctttggccaaaatagtcctaaaattctattttatgtgatccaatgtgtcttttgtttctattattggtggcatgtgttctgaagcttttattctaaagagaatatttcttcatggtcaggtaatttcactagttcacatgaaaagatgcctgctgcttgtaactgttgtcttttccctcatcattcacctattttatctctgaaaatatcttacagtgcccaagtcttttaatggtgccttactttgttactacctttatttttctaggattgttataaaaggaaagatacatagggaaaaatgtgggcacacaggatataaatatggaaacacacagatattttctgtttttctgagtgacttggatgacaaagaaagcacatactgccttggctatcttcctactcattatgaagcttggttctgagagtaactgatctgcccatattcacagaactaattgatagtgtaaagaagataaaggaataacttttcacttctattctttgcactatagtgtgcctataacctaaacagttttaaaatatataggatataaattaaataagaacattgtggtttgagcgaagtccttattaatgacctctatatataatgctaagaattgaaatttagctacttttcaaaagctcccttcttatcaaatgaacatacatccttcttaaataaaggtaatggatctgaaagtcaacttataactgatcttcataacatttagaaccttttatttccttcctaattcattatgtcaattctgaagaagataagatataatatacacttcatgtcttggtggcccttgtttatttgatctttgattatatattcctatgataatattttcaaatcacattagaagtggagacaatgttacaaagatgagtcagccacaatccaatgcaagatttcaagttgacatcactgggccagtctcgttccagcaattcataagtgccctgctactaaactgaccacactgctcagatcctcatttcttcctgaattatataagctttactcagtatcccgtattatttttaataaaaattctcttctgtttatctctaacctgtgtattgaccctgagtttataagaaggactgagctatgactgcaattgaaagctgtgggaggctgaaaagttggctcatttttattgaagcactcagaagattaaccatatgacccatgatttataacatcagttataagctgagaaacttcacacaaatggacagatttcacaaatagccctccacatcagaactcgcaaaagctgcctttttctacgaatcatttttactagtattattattgttaatggacaaataaaaagaaaaattacactgagattaacatgccagattctaacactaaacttttatgtcctagagaataaatgtgcattacaaaaataggtccatcaccaaaggagaagcagggtactcagtgaataaataaataagcaggtcgttttccaaaggatgatgcaaaatgggaataaaacgaaagtgaccttgtgggatgcaagaaagctcttcaaaagtaggatacatttcagaagggacaaagtgtcaagaggtccacttagtatataacttagtcatttattattataagcataatacacaataacaatattctaattcagttagtttcccatagactaattacttacaacatatcaatagagagaaaatgaacatcctttctgtacattaacatgagtgaccctacattttcatctcagttcacaaagacaggaagctcaaaacaaagataaatctactttattgtagattcatgtgtgtcactacagtaaaatatcatgacaaaacaaaatttacagagaaaagaagattatttacatttctaggttacagtcgaacattgtggagaagtcataccagcagaatcttgagacagtgcatctcattacatccacaattaataacacagagaaatgcatgaatttatgcttacttgttctcaattttatttctccactctacagtattcagtacctgccctgacgaaggaataatgccatccagagtggtcttggtcttccgtaacaatgaacaaagaccatcacccacagacatgcttacagttcaacctatgtctataatccttcactaagactctttccaggtgagtctatgttgtgtcaatttgaaggtaaccatcacagtattgctacataaaatataaattaatataaagttatttctgttttcttttgattgttggacaatctaacaccataatatgtataaggaaaattaaatgtacagcatcaattgatagatttgttaacaatatactccatttaaaataatcgaactggtttataaatcatatgtaaaaagagtgaaaattactgatataattaatttttgcccaaatatcttccttcacaaccctcccattaatccacattatataattcaggaattgtattctttgttttccttttagacaaagcaatgacattgccactgacagtgttcaagaagattgacttatttctataaaacacacattagccaggtgttggtggcacatgcctttgatcccagcactcaggagacagaggcaggcagatctctgtgagtttgaggccagcctagtttccagagtgaatgccaggataggctccaacgctatacagagaaaccctgtctcaaaaaccaaaaaaaagaaaaagaaaatacacattagagagcaaactttccttttgtttactttctccatgtttttatttgaattagaaaaaagattgttttacatgtcaatcccagttccctctccctcccttcctcctctgcaaccccccccccaggcaactaaaaccctacttatcacatactctttctgcttcccagtgagggtgaggccttccatagggggggtcttcagagtctgtcatatcctctgggataggacctaggcctactcctgtgtgtcttgactcagggtgtatccctctatgtggaatgggctcccaaagtccacacctatgctagggataagtactgatctactataagaggacctgtagatttctgaggtctcctcaatgacacccacattcctggtgtctagatcagtcccatgctggtttcccagctatcagtttggggactaagaactccccattgtttaggtcagctgtttctgtgggtttcaccagcctggtctggacccctttgttcatcacttgtccttctctgcaactggattccagttcagttcagtgattagttgtgcgtgtctgcttctacttccaccagctgctggatgaagactataggatggcatataattcagtcatcaatctcaatatcaggggatggcatttaaggtaacctcttctctgttgcttacattcttagttggtgtcatctttgtagctctccagacattcccctagtgcctgatttctctttgaacttataatgtctccatctataatattatctcttatctttctctcttctgctcttcccccaactcaacctccctgtcccatcatgtctttctcccccctcctcttctccccttctcattctcctagctccctaccccctccaccccagcccccatgctcccaatttgaaagcaaatgtttctatttaatatcattgaggagaataaaggaagactttgaggcaaatgtacattcaaagctgaaaatatgaccccatgttacctcccaccacctttccatcttcctggagaatgaggctgagtataaattatgtgtcccttatgtttctcctgatgtattgcatagatttaactgtaggtacaggagcctgtttccccactgctgaattccggagtctgctttgtgagaaatggtgtacaaccaaactacttccaatgtaatactacctctaatactaccttatccatgcacagaatgaaaaatctagaggagagatgctaacaagattcaaataagacacagggttcttctatttcatcagtagtgagacacaccagggaaactgagccagactgactagaaaggtgtcttcatataccacctccccatcacacaagctgtttttcagcttcttcctcttcccaccaaccagtatgcacagactccaaatggacaatggacaaacactgagggactggcaggactcagaaaggccagaagctgaacttgaatggcaaataaaataataatcacatcaaagaacttactattcacctcagagaaacagaagctttaataactgcattaattatggatgttattgagacagataaaaatttaataaagagaggggatgaaagatccctgctcatggcaaacctggaggtccaaggcccaggattacactgcaactttcagaatgaactgaactttccatttgagcacatttgccttgagaacaaccaggcaaatgggatacacacatggcacaaaagagaggggcaatgtaaaggtctgatgtcatatcagctgggagcatcaaagaccttatcttggctagagtttccattgctgtgaagagacaccatatcaacagcaactcttataaaggagaaatattccattgggatggtttatattttcagaggattagttcactatcaccatggtgcaacatgctggtgtgcaggaagacttcaaagcacatgcccatggtgacaaggtcatacctgctaaatgttgccactctctgtgagctcatgggggccagttttattcaaaccaccccagaccttatatgaagaaatcccatcagaatgcatgtgtcttgttttggaagtttgcattgaattttctgcatttgtttgagttcattggttctgtttagccattgactctctcaatccttgttggagagttccagaactacgtagtccccccaccaatcaaatccatacccctgctgtaaaaacaaactttttttgacatctatgaatggtttaaccagaacccgacttttcttagaaagacttgatatttttttattgccagaagcttctactgaacatctcaactactgaaagataaaggatctctgcatctcattcaatcccaccaacgacagacatccatacacctgggaaaagctactacatgatagaaagatccttgtatctcattgaatcccacctgcaacaggcatccatacagttgggagaatctttacatttcaaataaggcaaactgtgtctacagctggaatgtaagaataagaagaaatgggaaaaaagctatatgaagcctctacattaagaattctaatgaagctatttcacgttcaaagcaaaaggtgcaaagaatcaaggtaaataatcaacgcaactaataggaggagggaggcaaactaatagggagatacgaagcttaactccactttgctttcttcaacagattctcaaaacagttgttaatataaagagaaaaaggacaacccagaaggctggaaagggaggtcatcatacatctgattactaatatgtgacattttgtttgagagaagtgagggaaaaccccctactatgatattctatgacaatccaagtttacacaagaattgaaggttatcaagtgacctttctctaactagattctgtgttgctcgccaggattttcagtgctgcttattacaaagaatggctacagtttgagaagcttgtgaagtgtcagaatgtttctattgagaatgacagatgtccatgctcagaaagtgcttttccattgattgtcttaaccatgtgtctgataggccattggaaatttagccatagacccatccatggtccctggtcagctctcctcatttataggagcagatgttgggtaactttgcagcaggtgactattctcaggatggcatcttctctgatttctagaaagtttagtcaatgaaaactattagtagaatgttaccaggttataaggaaatgaaaagacaaccaaggggttcctaccatgaccactaacattaatatatttcctccaatcttctatgtccttaacatatctctcctgccagaaactacctttaaatttttgagatttatcttttctatgaatttctcctctagcaaacaatctttcctccttggtaaatagagtaatgacctgaaaagaaaaagaatgagaaaatgttggtttaaataaatggaactttggataaaatgagctgaagtacactgaagttttaagttaaaatttgtatgcaaattatttacagccatcatgaaaacttgtaaaataaatggtgccctcttcttccttgactgggaaaatgaaagaaaatataagacctttctgctatccagccaagttcagctggagaatgaggctgagtataaattatgtgtcccttatgtttctcctgatgtattgcatagatttaatctcttctagcctcactttagccaaagacactaagaagaaaaactgcctaagcaaggcagctcaaattatcacactacttcacgcaaactgcaaagaactctgatgctattagtttgaagactgaaagcagctgttgaaacattctgtagctttaaaaagatcccacaaaaaagtaaaaggtatggatgggtattctggaccactctcctatttcacacaggtgggaaccttaagttatatgattcctttctctacctaattccaggaagttacatcagatgtatcaaatacaaatgggccatgtcttggcacattccaagtgacagacctccatgcatgatggcttaagctacggtttctctctcatagctttgcaatctgagaagctcagcatgaaaatctaaacagatctgctgtctcataaagatccacttccagacaaatgtcaatcaatgtcctcactgtgtgttcatcggggcagcaacaatgaggggtctcatatacaaataacacaaaattcattcatgatggcttcaatctcaggagctgaacacctccccaaagtccactttctaatacttcttccttagagattagaatgtcaccacaagggaaggtatataagcctcagtcaagaacaaatagtaaccatgttctgaagactttgagtctgaaatttcagtgaaggcacagacattcccagtgggacccatctttgttagccttttaatcaattccgagatttttcttcccaatggttaaccaagcaggccaataatagctctggactcccagctgatatttccctctgcactcacagaggtgttgactgcccagaagtcacagctactcatggaccactgcctccttggctgtccctttgccacagctcatttgtcaaacaccttcaaagtttacacttatccacatttatcagtggctttaggagaaatgttagggacttccctgtgatctctgagctctgctatgtagaaactctctcttttagaccttctaccattagacaattaatcatgtattcacaaccaccactggttagtctggtttatgaacttgtcctgcctggtgcaataggtctgtgacaccagacactacagtcagcatagattaaagggagatggatcagcagtaaagcatttggtggcaatcccaacaaccttattgcagtcccttggacccattcactggaaggatagaaccagttcctgtaagtccctctgtgacctccacaccagtgtaaaatttctcactcatatgtgtgtgcatgcgcacacagacacacacacacacacacacacacacacacacacacacacactgcaataaaaaatcaatagctgtaaatagcaacctttaattaatttttaaaaaattgtagaataaaatttgctattttgcacaaaataaactgtatttatatttacattttaagtaatttataaagagcttttatattatcacataccagtaatatataagaaaattgaggcctaaagtaattgtaattatttacatgtgaacatcaatactataaaatgtttaatttttaatatacaactttgtgcttcatatgtattatacaagtgtggctaatatatattaaattctttaaatgatacaaggacaaagatgcaattttcatgtcttccttttttaacatctaggtacatgaaacaatatctgaaaacaaagggaattctttaaagaaatatgggctatttaacctaaaagagatccaacagcaaattcaatatttttatgtttccatttctgtaattacactcattcactgtgtgcttagatgaacactcctgactagacagtgattccttttcttcttttttctttttttcttttttctttttggtttttcaagatagggtttctttgtttgttggttggtttgttttgttttgttttgttttgttttaggtcaggagttatttgtctccactgcagaccttaatttataaattaggaattcattaatgaattaaacaaacaactatcttcacacttttacctctaggattaacatagtaaataagttaactttatagtaaaaaatgtaatgaattaaacaccacagagaacagaataatgatggtgggagccggagtgctgaggcctggttgcaaaacaaagccatgctttaagtatcatttccttccagatacaaaagacacacagcccagtcactaaagctaatgaagatatctcatcttcttggaaaatgttaggagagtggttgtttattaaatgttcttcccacaaaaatgagaattatatgaggaggcatatagtttaattatgttaactagcaaaacctaatcagtccacaatgcatatattcttcaaaacattataatgcacataataacacaattttaaccatcaacttaaaaataaattagataaaaataagattgcactattcatttaaccaagaggaatatcagttaaagaaaatgtttttcctacaaattctgttcatacagcattcttttagggaagagtgatagttgaaaaataagtagtagataaagagaatgatgatagatagataatagagatgatagataattagctaaaaagatagatcaataatagttgatagatggtacatagacaaatagcagatagataaatgatagatgatagatagatagatagatagatagatagatagatagatagatgataaacagacagacagatagcatagcattgatatacatacagatgtacataaccaacccaatgaatcttttttgtttggctattgttgacatgtaaaacaatcttgtttctaatttaaatttaaataaattaaaaagataccacagaatggtgagcctagctatgatgcagtgttgaaaggccataaaggtaaggtttcttgttggagtctgttcagtttgatcatcttgaagttaactggatatctgcagttttcttgatgatagtgcatgaattttagcaatttactgtttctttcctagctgtctgtagatgaattaggcttcatatgacaatctgaacagggccaaagccagacattctaaggacagagctccaaagcaaaggtccagtcattgtgagtggtgttccctctgctacaagcagaaaaaaactataaggacatgctcaaatcagggatcctcttgcagttacaatccccacaatttagcaagaattgaaataatacaatgacccatagctcaaatctccagtcccatttcttagcaataaatacacaagttaaagggtgagtaggcccttccttggaatgtggatcattgaattgagatttgctgtaaacacaaaagacacacttgaaatcgaatggttactaagaaaaaaagaagggaagtatccagttaatagtttcttattgctttggagttgaaatagtattttgtaaaatactgggttaagtaaatgatcatattgaatttaaaaaaaactattttttttttttttgctgtagcccttgggaatataaaactgaacttctctgtttctcattcatccagcttcccccattcctcaaggctgtgcattgtctccatctgctacagacagtgtagtttgtgaagcagcatgaggaaaagcacttagaaaaatacagctgctctctcactgtgagagcaaagacctgcctcctaaaagaacctcactcacagatctaacatataactcaaaggaagtcttcacacaccaaaaaaatctttagaatgtatgctaacattgtggaatccttagagatccaactctgcctcatagacagatgattagatgtctgcatgaacacaatcacttgaaattgcaatagtgtacatatgaggctatcgcctttaagaaactcatgaaatcggagtttctgtcaaaaattattctgaaaattaagttacaaaatttaattacacagaaacattttgagtaatgtaaagactcacacactgacttctaattttgaccctttctttgcagatgtggccaaaaatatttgaaagtatttctattggaataaatgcattttcatccactcttacattggactgtctttcatatgttacgtattaaataccttaaatacatgagtgacaatgaagttgtctgctgtatggaaacccctttcatctttacacaagataagtcaagagaaaaggttatgagagaaaagaacagaagggagagaaagcaaaaatgaaagagttaaagaaacaaataggtaaggtatctttctggaaacagcccagtgttgagtggatatagcgagtcgtgtgtggtggtctgggagaacaggagtccttggagtattcatctggtagcactataatgacatggaagttggaatcagtggctccaggatgtatcctgtagcaagacttgaggtaatatgtacaaatattatcaaagacttcagagcacctgtggagcctgtgtcaaaacacatgacaagtcacatagtggatgaaacagcttggatgcacatagtcaatggagtgataccaataattctcaagttaaaccactaaattattaggtcatttaataaagccctgtactatgatgaaaagcttttagggtcacactatctatggagcagaaataattagtgtctctttacaataaaaatcacttcattataatgctctgtttttatagtgtaatagtaaacacttaatcaaataaagtaactcttttaggaagtaaaacccccctttttatgcagacatgacaatgaaagatcaattatttggttcattttcttgcaaatatcttttaaattttaatatttgacatttttcaagtagaaaccatagattcatttagactaaggctaagggaaaaactgtagaattagatacaataggcagacaaattagtatatctcactaatttgaatgaatacttccacatcttggaatatcttcaagatatatacagaggatccccaaactctgaatgttcttgaccatgttaaatacggttaggaaatatgcaaggatttcattgtaagcacacatttcattatctttgatttaaataaatcaatcagatgggattaaatggttttgaatttggattgactccaactgacattttatttcttattcccatgagcaaatagccatccttgttttatcacctaactggactgtgttcctggccctctggccatgtgaacaatgaactccagttacaaagactgccacaaacacaacttcaagaggccttgctcaggaacaatcattccaacagtttgaaattttctgagagatccacgtcagccaatgttctctgtattctctgtaaccttacatacagttactctggacagcactgtctattttgtatcttttcttattgcggctgggttttttcctgttctactgtatttgtgattgacaataggaaggcctgcaagtttaaagtttctaattggttcatgttggatatttctgaataataaaaagtgaagacatacaggtgcaaggcagtgactggagcagctagaagatcaggacaaacatgccacacccatctctggctgcatatttatcccccccctttgaataattctggggaccttcttccagtgttgcaatattaacccttaataaatgttttgtctggtggtctttggtctttattatgagtagggcaagctgagatgatcagatacagaaaatattccagggcctcctgccccagcaatgcagcaacagagagcatgagaaggtggttgaagagttccagagagcagccatggcagaaactgcaagatcagacatgatcaaagttgagacagtgatgggtacaaagggaatatgaagagccaaaggggtaacactgggaataaagttttgccaagcccagtgctagaagggtagagagactttctagtagcaaagaacagacagggggatccctgacacccaaggcatgagagcagtaacattatctgctagacactaggctgctgtaatgtaaagctaaaaaaaatatccctcttttcttgagctcctggagctataatctgttgctttgaaagcttcctaccatagcctttagcttttgggacctagaactataaggttgtatgtctgtaaacccagcctataagccagtggcactccagctcagactgagaacactaagggaagtggtccttgcctgcttgcagtgacccaccagcaatagctctgtaagactaggaagaaaaggaaaacaaatgactgcagttaagttttccatcagaaagacaggtgaggattcagatatggactcagaaaggcattatactaaaatttattctccagctggcaagatggagtaaagacacttcttaccaaaccagaagatgcaagtttgagtccttggattaacatgggggaaggcaagaaatgagtcctacaagttgttctctgatcttcacacatgaactctgtcaacacacacacacacacacacacacacacacacacacacacaaataaaattttaatttattctccttaacaaataataaggtgagtccacaaggtaccaaaagaataacctctgaaccccaaagaaattttgtagaaatgacttccatctttctctccaaaaagttgctaaacaggctataggatatgtacaacagcctggagacatgtagatgtacatatatattcaagtagattgaataggaataaattgtgggaagtgccaaaaatagatggaaggtagcaagacattttcatcttataatttggcttaaattgtatcagtctatggccataccacccttaactcacccaatctcttctgatttcagtagctaagcagtaccagccctgtatagtacctggatgggagagaacatacaggtgaggccatgataatggaaaactttagctaccacacattttctgtgaggccactggccatctcagcttgcttttcctctacctgaacttgatcccaagatgggttggtgtagcatggattcaaatagtgacacattagagtaatgaacattttgtgattggtcccgttatctttcattcagctgtgaattcagagatttttcagtctgtgaaagataggagtaaaacttgagcatcctggctcttacagcctatgcttcaacatacttaaacatgctctttacacaagcagtgctatcaagtatctgaactctatcctgttgcagaacagccataacccagagtgatactggaaatttttcacttttcaaataagaattacctttctctattcttcctgattccttaagttctcctccactccttcctccccactcctttatgctcaggagatcaaataagaattacatacatccaaggatgaacctctacttgtacaaaaatttaaaccatactaagtaaaattagctctaacactttaaagcagatttggggacaagtgaaatgcttggtaaatacaggcagtttccaatgaactgaatgacctgagttcagtccctgagatccacattgtggatggagagaaatgaccttcccaagttgactcccacaacaagagagagattaagacttgtactggaaacctagatcactattcagtgctactgaagtcttggttactggaggagaatctacaaccactaacttactaaaccaacatagtccattacaacaatctataaacattgaataagtgtagttttcacctctcataatggaaacttatctttgcaacatatggatagcactacagaaaaccacaaccaataaaaatatagaattatggcacacattcacaataaatactatctacaaaacactcccatgcctggaaatattgcagaagaggagatggacagataaagaaccagggatcagggagtttgatgtgagattgtctcctggtagtattacaagccacacctataaagcctcaccaatatgacctccaaaacctgacctgaacaagaatgataccaatgaacatgccaaagtggataaagagaaacatacaaatcctcaactgtatgcaaaggcaactgaggaactgtgaataggagaggtaaccttccccctggagagcacacaaattgcttattcagtagcaatcagccctgaaaacatacacacaggtagcattatatggactgagcaggttatatttagtaatatatgtgtatatacatatgtgtatccaataacagttagtttaaaaagaggtaggttgtgaatttgaagaaatgaaagacaacatgaaagaatatacaagactttggatgcaggaatgggaagagacaaacgttataattaaactatattctcaaaaataaaaataaactatataaaaatttaagttatcttcagtggaaaaatgttgtcttctgatttacattattgcacacacacaaataaatcaagaaagaaagaaacaaacaaataaataaataaatcataactcatgttctctaatagaaatagataaaacattctagtttcctggaaaaggaaaccctttggttattgtaaggcatgatgagttgagctgagagatatggccttagggttaagtgcaatatttatatttatacttagatgcagcaatcatcaaccaagtgggagatatgtccctgtgtcaacttaaatcttaaaacgtccaacattgaaacagcttctacttattcaagcacaggaagcaacacttgagcccttctgaaagacacagggtacagttcatcaacacacaagttccatgttcctaaagctgagctgcaaagcaggagaaaggtcaggcaagtctggcaggcagagggaataaatagaaggaaaaatctgggaagagatatcaagaagcaaaaaaaggaggaggacttgaggggccagtctcccagctacacaaccagtaatggagtaagaagtaaaaaagtaaacatatatagagaatattgaaagaaaagtccagaggcaaaatgtagattggataatttaagttaataaaagctggctagaaacatgccaagctaagcctgggtatttataagaaagaataaccctacatgtatatttatttgggagctgggtggtgggtccatgaaagagccagagaattaaaacaatcaactacattatatacgggaattgttcaagaagcatctattttaatatttacttcaatgcattttctattgatatctttagggtcttttactccttgtatatctaagagcagtaaacttattcagaagtaagtatatccaaatttgcaaacatcattgcatggattaatgtctgctgtggcacactcacagatagaattcctaatacaaaaatccctaccttttagacatacctaagtacctaaaaccactataagagacataaatgtaaattcaggtctctagagaaatggtgttgttataaccacaatatcttattttgctacaacttaatcatgtgatgaagaattcagcaacaagaaatgtagctgctttatcaaaactggttaatctgacaacaggtatagtaaaacaataagaaactcagcaactattcattttattccaataactcaccaagctatctgtcccatgcaccctttacttaaggaagttcactgtgccaaaatcatcctaaatattttaatctcatatgagacaataaacatgttgtgtttcctgtcagtatcaccaatcacaaacaagctgtcactgggggtggtctttgaggtttcagaagctcaatccaggtcttttgtcaccctttcttaatgctgtctggggatctgaatgtagaactctcagctacctcttcagtaccatgtttgcctgggtgctgtcattcttctccccatgatgataatgaactgaacttctgaacctgtaagccagcccataataattgttttcctttataagagtttttgtggtcatggtgtctcttcacagcaacagaaatcccaactaaaacactgaaatgacagaagcaataaattaaagttccaggactggatattatgtaacactaaagaacaaggccttgattcttgcgtaacattatcatttgattcaattcctatcatggacaaggcacttcatggagtgaaaaatacaattacaaaactttattgatatccccaagtgtcttcccaacaatattagcaggttggagaggaatggacagagtcagaggaagtgaaaatgcacactgctatgtgtggaaattgctacatcaccatctacaaccactgtattataattcaagtagattaagaaacagaatgtcggggagtcactgaaaatatacaccatactgagtaagagtcaggaggaaagagaacaagggacatggtttggagaagagcaaatttgaaatcatctcatttaaaaatttatctgaagataaatgcttaggcagtgtgctgaaatggaactcaaaacataattaagcatgccaccagaaattaaaaccttttgaatttacccatgcaaaatgttcatacttgaatagaaatatctctgcccaactaacatttccaggtcaaattagttctgcccaggatgaatactaagggatggggagtacaaattaatgagttttattaaatcaaaaaccctattgaaattataagaagcatttacatgtgaaatgtataaacagtcaaatgattacataatcagaacaaagtctatatcatcaattatgtacctacattcatttaaacatgtacaaatagtaacacattgataggaacggagctacagatacagacatatcttttatcacaactatcagtttaccttcattagtctgtagcaacagagttaatgtcatatagctggagcactttggtttgatcctgtgagacacaaatccataactactaccagatttttcagactggcaatattttaatgaagggactttagctctcgcttctcttctttatctgaacttccaaaattttcctaaaagtttacttccctccagcaactcatccagtgctgcttcttgcacaagtatattacttgctaccttaattacttgtcgcatttctatcaaaagacatctaataagagtaatgatggaagggtttaaaggtacagctcaactccatcaggcagtcacagtgacaggagctttaggccactagctacactgtatccttggtcaggaagcagagagagatggaagctgatgctcaactctctcctttatattaagtaccaaactccaacatttgaataatgccacccacatttgcttttcccgcctcaactaatttaacccagaacctctcttacagacatgcccaggtgtgtctcttaggtgagtctagatcttgtccagttggcagtcattatgaatcatcacaagcattttttccgatgcagtccacaataagaaaaagagaagtgtacccagatgggagagatgagttacagcaaaaagtcaggtggtaaagtgcttggcacataagcacaatgacctgaggtcaggcatcagagcatcacaacaacaaaaacctaggtgtggtagagactctagtaatctcattactggggaggcagagacaggaggatcccaggccaccaggactaatgtagctgttatattctacaccaatgagaaaacatgtctcaaaaacacaaggcaatggctcccaagaagtgacaccaattaccgctctagccttgacaggcacacagaacaacatgcacttggacttacaaagcatgaattaggactagggggctctctatgatcaaactccatcatgtcaccagatgtgccattacctcaggagaatcagggctgcttccatggagcattatcatcccagaataagtcaagccatttctagcaaaggtttaaaatccaagcaactagaaactatgcttaaagtgaaagaacccatcattacaaaatatggaatggaaaaaaatatggaacagtttcatgttgtaacaaaagtactattcttagctgcatatgagtcttaatatgagttcaatgaagctaatatcaaaggtgtgtacagacaatatcctagcattattgaagtgtgtacaaaaaaacatacttatgctgtattctgagtattgagaaatacccacataattgcccacagggaactcatcattgcataattctttttctgatagtcctaaattatgtctgactagctcagctttacattataaagagcacagcagtatcttttttactaactaggaagcagggtgcagttcattctctcttcaggaatctgtcctctggccatcattcaacaaaagtaagatgtatagaatcttgatgtccaaatcattcagcagaatataaattgcctattaaagaatcacactgatcttttgattggcagatagtatcaggcaaggaaggaagaattggtgattatcaaatgtcaggaaactgaatgatattggatgagttttagattcttctgattttaataaattcccacatggcacagaccaaatctaactcataactcaagaaaattgtctctgtgctctgcctcttaaacatgtttgtttttcttctcagacaagattaaccattagtcattttaacattcacagtcatattagtgttggcctatgcagagaaaaagaaccattgaaaaataaatgtgtccagggtgttattaaagtgatcgtgtgaattaagaactttgacaaaatgtgtatcatgaacacaaaaaatgtgtttggtagcaggtgagagtagcagaaccatttgaaaggagaaaggatacagtcaatgagccacttaaagttgcaaaacttcaactttaacccaatttagtacttatcatttccccctctggaattagtggattagacatttaccaagacatgattagatttttttttaaaaaaatcttcctctgtactatgtttcatattggtttcccagtagactatcatctgaaactaattagcgagtagtctgaatgaggacaaatattttataaaccttaatatccaaaatgctcaacaagtgcctttaagaatatggtatgtagggatctactttctgaaaacattatttagccatctgagtgtgtttgacaaaatgtgaaaaaagaaaaaagaagaaaagaaaaccctccttaaatggtagtccatgcagagcacactaaaatctaaaatcccatacaaagaatagctctaaagcattaactgtgtataaacttcaaacataaaaaaaaataaaaaggcaagggtgacattgggatgtcctagatgaaagttcaacaaatccctccatcatcagaaaataaagattcataaaactttccctgtagaagaatacaaatatattttatttgcctctgtggaaaaaaatgtgtcttgaatttgtcttaaattataaaaacttggaaagtgattcacacatcatgatgaaaatatatttgaaataaatatatgcaccaatatcatccatctatcatctactatctatctatctatctatctatctatctatctatttatctatctatcagatttacaaaacatgcaccattctgtactttcccctaatatataatccattataatttgggagggtgagtagaaccacatagtagaggaaacctaagattaaaatctcctcattttatccaatatgcacattctagtggcactaaagaggaaaaaatgagcattccatttaaatagctataaaccagcaaacaataataacctaaaaatttgtaattaaaggaattccaattttatggtaaaatgggtaatatctgtttcccaatttcagcccatttcctaaatgattttagggttatagtctcaagaaagaatactatagtaataactgaaatcaacctccatccagacattggtggtgcacacctttaataccagcactcaggaggcagaggcaggcagatctctgtgagtttgagtccagcctggtccacagagctagttccaggactggctccaaaacaatacagagataccctgtctcgagaaaccaaaacaaacaaacaaacaaacaaacaaacgagaaaaaagaacagaaaagaatcaacatccagttgtagatgtgccatagtctcctttaagagttaatctctggctcaggtacatgatcaggctaagggacaaccctctgaaaggctggacactcctaggaggtcaagcttaccccaaggaaccatgctaggtatagaataggtggaataatttctcctttaataagaaaatatgctttctctcccagaattcccatccactaacgcagtgtcttactgaactgtagacacaagacttcatgagtccacccacttttctgaactaccaagaaaatcgtgactttcccatttcctttgtctatctctttcctaaggatgctgaatgttttccctaacacttggtcttctgctgagtttcacaggtttcctgccttagggtgttttgaactctaataaaattgtctttgagctaaaacacccaaaacaaaaacacacagatttccaaatccaaagaaaaagagatataaataacatccatacatgaaactacaattcacatatcctaacttgagtctcacaataattatatgagatcagatacttacactgtacattggaatagatgagagcctacagacatacacacattaacaggaaattagtccaaccagcacatggcttcagtgtgagtaatattgcagtgggaataagtgtgttcagtgtatttagttatattcctaacaggagttccacagtaccacagggtgattttagttttaattgatctgtgaatcctcaactttgctttccaagatggctacaacttgcaatgtgactaagagtgcaaatcacttcccctttgcttgcattcttgcaaacacttgatttctgccatatttgcaacaataaatctaatagaaatcagttgaatctcaccttcatttctaattttcatttctctgatgattagaaattctgatcatatatttaagtatctgccagtcaatgtcttttagtcatttttaaatgggtttgtgtatttcctattattgagtagttatgccataaggcaaaaatcactgagatatattttcagtttttgtagtttatttccgaattttatgatgctgaacctcatgatacaatatatgggctaaaggcaatgcacattattttgtctcttggctactgataaccatcagaaatgatggaatttttttgtcttttgactctagcaccgattatcttaagctctgctcattattgtctcagaaaactaggaaaacaaaaggattgatagatatttgtaaattcctttgtttgacaatgacataagacatacttttattgactaagaaagaatggataagaggatgctttgaacagaccattcttactagatctgaaagtgtaactgttgtttaagttgtttaaatgaaaacatgattaaaaatcatataacattgcactgaagagcatgataaaatctaacagaacactaagcttacctaatgaatgattctaataaatgaattgtgttcttacacactaaatcaactttatcagaataataaaaaccctataaatgaatgcctataaaatatacagtgtagcaatcagaatcaaagtagaatcctttgaaaatcagataactatattttcaagcaaaactgcattctcttatggttacaaataaatgctttcgatgtttgcttttaggaaacagctctattttatagtttttaaaagaacacaactatgttttgttgaagataaccattatataaacgtaaattcttagttcctataaagagattaatctaatgttctcttttatagaagttttaccattcactcaggttggagatgtcacattttaaacatactacctgaaaaattgtcatacaaagttgataggaaatgttttctgtttctccaaagttttactatttgttttggttctagaagaagtaatagtcacatatggaactcatcaacatctaggaattaggtaacacatgatctttagtttcagcaactctgctgtaagagctataattacctaagactttatcattgaccctatgttgctgccattttgtagtgaccttatttaaattccatccatcacaaagtcaatatgtccaaaattaactcataatccctttatcaccccatgcacacacatgtacacaatcctactctactcacaatattgttttcttctgcatttttcctgttacaaataataaagtcaccctggagtttctaactcccattattgaattactcaccaagtcctattgattctactccctagatgtccctttaacctactttcctaccattccctttgaaacatccttaattcagatctttattgctaaaatagcattctaatattctcttctacttcaaatcttctgatctacactctaatcctcccctattctcctcaagactattgaaagaataattccaaatcagacacagttatatcaccagctttccctgaaatttaaccatatgtatattacaaaaacatcttagtttcacacacaggtttcaatatcttttgttgtcagctacttgacattttcacaaccttcctatcacccacagagatcttacctttcagcatttcaaaatggattgatgggcctgaattaacccgtgcaacttctatccattttcccacgtggaatagaatgggatagaatagaatagaatagtgatgaagatgaagatagatggatgatatgcagatggatagatagatatcccttaatacctacttcccagtgagaagccttcataagtaaaggtatatgttaaaaatgttctgtccatggatattaagaaaggcctgactttatacctatcacggacatcttagaaaggtatctcatgagatcaactttgtgtagaacctttgtatttcatataattatttcaaaaaaatcaccaaacaatgaggcacatttaaaaattttactgagataataagttggttatgcccaaggccacattgattacttatccatgaccacctttagccctcttacaatcatctttaagcatagacaaactaatgaaaaacttctctcaagaaaaaaatggctattgaaattctccatttctcattcatgtttctatcttcctgtgagcacaatgtggataatctattctccaaaggttggttgttgtgaacagccttagatgatagatatagtgtttctttatagatgcaatagaagatttctatactgcctagaacaataaagataatttctcttttgagacaaagggtaggtttatttttaatttattattaaatattagaggttgaggagaaggttcagtcagtaaactgtttgctgtataatcatgaagacctaagttttcattgtacacataaaacattggatgtatgtcatgcatcagccatcatattttgaggagcagacatagaaagatccttgaggctcaggagcctcaattatgtgagctccagcttcagtgagagaacctgtctcaaaagctaagctaagcaggagaagaaatattgacttcaggcctctattctcataaacacacagctatttctagcatcctaagcacccatagaaacaaacatgtacataataccccaacccacacacaaacacaaacacacacacacacacacacacacacacacacacacaatgaatttgagttattttttttaatttgagtttccacaggcttgataaacctgcatgtgatcttattccatccttccatgagacttaagaccggtagaaaataatgaatgtgtctcacattgctgtaatgcagtggacattaaagtttcctatcttataataaacatcttgttgccccttccagtggccaacaagcagatccacttatatgactccaattaggactgctgtgaataataatgtcacaaagcaacacttcaagaacatatccagaaggccattgcagaatcacccaaaaggctggaaaatgaactctcaaagtggacacaggaatgtgaactttttaaatgtgcccaaataaatatttttattcaaaatggctggaaggactataaagaaagcttcaagtttaaatgtatatatcatttttaggaatacttgagttcagtttgcagcacccatgttaggaggcatacaactgcctccctctgtcttcagatccagggaatgtaattccctcttctggcctctatgagcactgcacacacccacaaacaaatacaaatttttaaatctaatttgagtttaacattgttatttttacctatgagtcttccctaaaacataattcaagaatgttctaggttttgtattagaggactttgttaatgataggagtcaccctttatgactcttaatatataatttattgccacatgacattgatatctcaatgtatcatttaattaaccttttcaatttttctgcaacagttgaattctttctatcagttgagctgttatgcttttctgttcaaatcagagacataggaatcattgtagatattgaactttattgtgattcctaagtaacttataaagaacaatagattaactaaacatgtatcatcccagaaaatatgactgtttgagtatatatagttatgagtaatgatacacatttatctaaatgatgactttgttacaaaatttcaacaatgtgcatttagcatattatgtgttacagatcaattctaatcacacaaaagctgtaacaatataccaaaatagaaaagtaaatactaaaaatattcacaatgactaatgaaaatcattgcagttagcttcaaaataagctttctttatggttctctgttctaattttcaaactgataaaagtccaaaagtttatcaactgtagaacaagtaaatacatttcaccacatcttgaataataaaaatgctcttcccaaatgagaatggagactatacctaaatgatgctgccatcactacttcataagcacagacctgaaagagtagttatgcaagagtccaccccctctacagtagttttcctggctgaagcagggagactgtgaaagcatttgcaatgggcccttgatactcagctgggtctacttttatgggtaatattattcagttctaagaatactaaaaaaaaaatggcttgtctaagcttaaagtgtctattctttacattacttgtcttagtttcatttctgttgctgtgacataatatccctacaaaaaggactaaagggttaattttggcttataaatactgattcattattgtggagaagtcacaatagaaggaccttaaatatctagtcacattacatctacagcctagatcagaaaggaataaattcctacatgcttagcactttctctgctgctccaaagtctaggatcccttgactagggaatggtgccacccacagttgttttggatcttcccatatcaaataaccatcaagaaaatcctccacagacatgccacaggccaacctgagataactaatctctcttagagattctcttctaataggagtcaatgctgtatcaagctgacaattaaaaaaatcatcatatcagtttttaagtataggaaaataaataacccatccaaattaagacatgtttgagagtgaatggggacatgaacacacacaagcactatacatactcacactagggccagttgatctcttgagaaccggtgatgctctaaatcaccacaatgctggactcttagcctggcctttttcaggcttcacttcacattgattttcagcctttctaatataattggaaagagagcacatccagaaggaacaaaattgcatccatacaatcatcttttcaaatatctattactgttctgtcagagatttgaacctgactatgaagaatccagaaaatcccttcccttcttcccacatcccacaaagtaatagagagagaccctagggggaagcctccagcagcactgatctatcctcataatcttttatctctgttgatcccaggctcagttacatcagaatattttactttggaagacactgcttatcaattccttccaggatgaaaatcatgtattaaagtgagtacctgagttatgccccaaggcaatattaaacatcccctttcctgctaaatgattttctgtcaactggagtgctggatgcccttgggaaaggcaggaattcatctataaagaattgccctacacagtcataaattaaatccccacaaatcaatggtatttagatttttaacgaagatagccaaggtgttatcaacaatgaaaaaaaaaaactctattcttcagtcagataattttcacaaatctaattactggaccacgggaaaaccacagtgtggtgaggcttgtttagtaaccgattcccaacaggaaatgttaagacaggagaatgaaaaggctctgtgaatgccaatcagaaagcttccagtggttcactggctcttttaggctatgatgttaaagatagtttatctctacaaccagatgcaaagaaagcagataagcagctcaaactggctgtgacaatgatcagataatatggtccactcactgctttctgttatgaatcacagcatttgaaactatccacttaatatactcctgtactttacagcctaatgtagaaatgtcaaactctctaattcaccaaaggaataatgaatcataaatgttacaatgcacacacaggtctcaatgtttatagacaagacactttcatttcatcagaactaaaattggcttcccaacacttgcagctgcagacaaaatgcccttgcttcaggaacttaaaaatagagtttattttggtcacaggttgctgggaaggccccttgcaatggcagacaatctttacatgccccttcttcatcctcacagatttcttggccagttgttcctcagtcttaggaacactgtttcacatacttgatggtacttttgggaacactgacagagtaaggaaaaatgtttctcagctgtcaataagaaagttagttacttggtcagtgtctctggtctgcagcatcaggctgagatttgtggtcctaatgcagcttacaggatttgggataatatatggtgccattagcagagctgagataggaacccacacaagaaatagagctaaggggatttctatgcagccatgtttgtgtgaagagtgataacactcaagctaggtactcaatttgccttcaccactgggagtctatagaatccctcctcagcaaaccagtcctgctaccaacagttatcctatcatataaatatgagaactaaacaaggcagtgttctgtaaagtgtttgttttgaagagagtctggaaaagtggttttcacatgagaaataggagaggcaaacagcactatcgataaaggcattaacttgctcagctctcagtaccacatttcctacttctacatctcttgtttggtggggaaaaagttcttttaagagcatatgtgctaggagcaaacacagcattggctgtgcaggaacaatgacttatatagaattaagaaaattgtatttatgctttaagtccaaaaggtgtgatgacttcatgtaaagaaattacctaaaaagtgagtctaatcaagttggcataatttgatatgaaaacagaatttgcatctagagcttaacatacatttaaacaaactgaatattcctaatctatgtgctgtgtacaacaacagtttgcaaaagtaaatggggctttgtatatatttagcaattcaaaataatatgtagtttgaaagagaagggatgtatgaaatgaattgggaaagggtacccaccaatgaagttagttttcaaggtaaatcagctgtcgattgagcatttctcatccctcaggactgtgtctacagaacagctacatatagccaactctctatcagatttattcaacttcaccaaatacttaaaaattccttgtaatcaagtagcatgaatgagaacacagttatctgccctatatgtagatatgagagtggtaatggaaacatctaaaagtaaaccctatttgagagctaagattgctatgggttatatagatttcattaagacgcatagtcataggcacaggagcagcctcccatctcccccatgaactcatcattcatcatggtcagtctcagagcctgatacatcagcacactgtgaagagcactaatgaagggaaaggaagggtggaggggaaggaaagaaattaagaaaggagggaaaagagaagggagtcagagaagggatagcagggaagaggagaggaggcaagtaaagggaagggaggggagagaagggaagaggagaggaaaggagaaatatacagagaagggagaagaaagaagggacatggaaggaagaggaatggaaatgggatcacactgtcactaaaatagccacacaaataaccaacacagactgaattttacaaatttgagcaaagctaaaaccgctaaaagatctgtcctagctttcttattttttatctgaatgtaaggagtttggaaataactttgtccttcctaagaattagaaaaggctggattaactggaaaaatgacactgtgtgactgcagaagggcagagattgaagtagaaacatccctcaaaatacaaggaaatatccattgggacaatgcaacagtgaaaaattagaccgggatatatccagacagaaaaagcagcaatgggaagctacttctgaagaatcaatacagagagaaccatgttgataaaaacacatctatgataatttttcatgaatcctagaaagtagtgtggacaaacaagagaaagagaaacactgtggggctgcagtcttaaagtggccacaccatattttgtgatgtttatcaccaagaaacccctggttctcacaaagaagatccaaaaaaaaaaaaagaagaagttgtctggacactaagtaggaggctgcaagaacatctatctcaaagcacagggagagctttcttcatgctctccacagaaagctgtttagcctaaatataattccaattgttttctccaatgaactggggaggaatttgaccccactagagatctatctcaatgtctggtcctatgtgtgtttccataaagtgggaaatgcatagtaccaggtactggcctacaagtgactggattagaaagttgggaaagatgacagtcatggacagacagataaaagacattggtggagaacttttatgaaggccacagcttcaagacacaagcttattatattcagaaacttcatcagggatctcaaggcttcccctgccacctatactcacactccacctaaaaagtctagcaagatcaattacagcagtgggacagggctggaaaccctgatggattgtttcaactgtatattcatggctccaagtctgagaggcagggatgggaagatgagatgtgaaagaatttaagatatagccatgactttcattacatccagcaatgcaaacagtatgacttacaaatagcaagacatcttgcattcagggtttacataccttggttgccagatatagcctcctggccttaataaatactaggagacattttgaaagatagcctcctggccttaatagatactaggagacattttaaaagacaagaagcatagtctacagacagaaagtaatcccatacttaggtacagacactgctttgattgaaaatctacttccaggtgaggagaatttataagggattggtgtcctttttgcccattttacaattctcccatgatgcctcttggtccagactttacttcattgtgtttgcaattgcaaacttgatattatctttctttgtaattggcctgatttttcatttttatctttcttcattcactcatggcagatacatgtctaaggattgttaactttccactaggtcattctatctgtttccaaacaattataaaagtcctttaatgctcctttctacctctgagtggcccattgcaatttcccctctttcatctgtaattgcatttatttcagtagcagattaacaatacccaaaatatgaaaggaatctaagttttcattgatgaatagggatggataaagaagtgacacaaacatataaacaatcaaattattaaaattgtaaaaagagatcctgacattaatgataggatcaatgaagttaacattttatactaagcaaaatagagcacagaatggaaatgcttctgatttcactaacaagaaaaattcttttgaaaatcaagtacagtataatttcattcattataagtttctcttgtattttcacttatctttgtgaataaattattccttgttcacttacctattgaaatacaccagacttagtctataacttggctattgtgacaagggctgtgatcatggatgtgacatatttctgtagtgtgttgacttagattacattgggtatattcccaggaatagtatggatagattacatggtatttccatttgtagttttggagtaaagtctgtactgttttccacagtgtaactaatttaactattgggttctactgctacttcattgtctttttgtaacctgagtaaataatttccatattaccccattttgtgaaattgaggctgtcattttgtaagttaaagccttgacaatgtttatatatcatccccatgattttacttagtttttataataaagattttgaattttgttcaaagtggtttatttattcatttattcaagtggttatgtaattttgtcattgattctatttgcatctagtaacatgttaaaatattttaattctttctgtgaaaacatctccattctgacatgtgaaccaattgatgcattgacaaacttgatctgtaaagattgcattgagaatttttgcatctttgtttactatttaagttgatccactggtggtgtgtgtatgtacatgaatatgtacatatgcacatgtgtgttgtatgtttgcttttctcagacctgcaagtgactgatgactgattgaaatgcaacatctctgatatttttttgtctctgctttttctatatttaatttttttcatatattatttttctgtgaactacaggagaatggagatttcagaaaattgaagaatcatcaccaagaattcacacttttcagagccatctctgatatttttaatacgagcattcaactataaatttccatgttaaaattgtctttgcagttctagtgagcagtgttttcatttttatttcactgtaggaagttcataggagaaatttctggccagcctaaccaagctgcagtcaccctgctcaaacaagcccaaataagcatgcatggcagacatttcctccctaaggcctgctgctacacctagagactgttgatgccaatgaggaaagaacaacacagcagagttggccacctgagccaatggtaccttgggggagggtatatgtgcaggcctaacttccttaataaacgagtctgcagcatgctccactactcacccaactcccagtgtctgcatccttgactctgcatcttcttacctctcacccaaggggtgtctgagcagggtcacccacaaaagtagttgttaaatacatgtctaatttcttcaatgacccagtaatcatggtcatgatatgataagtgtaatgaattctttcatgttttgtatttataaagacttcttttatgacaaaaactacaacttattttgtagaaagttccataggattctaggaagcatatacattcagagcttttggatggctatcctatctgtgcaagttaggtccatttaatatgtggtgagtttaaactatgtggtgtcattattaatatttttctctggatttcctttgagatgctaagagctaaataatgaaatatttccatgactgtgatatttgaacctttctaatccttgtgctcagtattatttacagaacaaattagatacacatatatttatgcatgtgtgcatagcatgcacgcacacagacactccatcttcatgtattgtttcattattagtacataataacttttatttccttgatctgggcttgtatatgttattctgattatttttgtgttccatttgcatggtgcatcaacttttttctggaaaaagaaagggtggataaatgattagaaactaaagatgtgagtataaccaatagaattcaaaacatggaagagagaatatcagttgttgaagactctcagaggatatacagtcattgaccaaagaaaatctcaagttcaacaaacccctaaaacaaaatatccatgaaatatggacaccgtgaaaaggcctaacctaagaataacaggtatggaagaaggtgaagaaattcagctcaaagtacagaaaacatattcaacaaaatcatagaagaaaacttccccaacctacaaaagtatatgcctatgaaagtacaagaagcttacagaacaccgaacagactggaccacaaaaagaagtcccctcgacacttaataatcaaaacagcaaacctacagaataaagataaaatattaagaccagcaaaggaaaaaggccaagtaacatataaaagccgaactaacagaatcacaccctatttctcaatggaaaatttaaaagcgagaaggtcctggatagatgtcctatgaacactaaggcagcatggatgccaacccagactactgtaaccagcaaaactttcaatgactatagatggagaaaacaagatattccatgacaaaaccagacataaacaatgcatatccacaaatccagcactacagaaagttctgaaaggaaaactccaacccaacacaaagataactacacactcacaaaaacataggcaatagataatccaattctaccaaacacaaaaagaaacaggagggcaaaattcacacacaatgacaccaccaacaataaatccaaaacaaacaagaaccatcaatcaattggcattaatatccctcaatgccaatggtcttaacctgcccataaaacgatacaggataaaagaatggatacaaagacagaatctttccttcttctgtatacaagaaacacacctaaacttcaaagacaggcgttacctcagagtgaagggttgggaaaagattttccaatcaaatgggcccaagaaacaagctggtgtagcaatccaaatatctaacaaattataattcaaactaaaaatcaatcaaaagagatgaagaaggacatttcattctcatcacaggaaaagtccatcaagatgaagtctcaatcctgaacatctatgccccaaatacgaaggcatccatatttgtaaaggaaacattactaaagctcaaaccacatataaaaccatacacacttatagcaggagacttcaacaccctgctttcaccactagacaggaccaccagacagaaacgtaacaaagaaacaaaggatctaacagaagttatgacccaattgggtttaacagatatctatagaacattccatctaaacacaaaagaatataccttcttctcagcgccaaatggcaccttctgtaaaattgaccacatagttggcaacaaagcaaacccccacaattacaaaagaattgaaataaccccctgtatcttatcagatcaccatgctttaacactagattttaacagcaatacaaattgcagaaaacctacaaactcctggaaattgaataacacccaattgcaccattcctgggttgaggaagaaataaaaaaaagaaattaaagacttcctagaatttaatgagaatgtagacataacatacccaaacttattggacattctgaaataagtgctaagaggaaagttcatagcactaagtgcccacatgaagagagtggagaaaagtcacactagaaaattgacagaactactgaaagctttagagaaaaaagaagcaaactcaccacggaggagtagatgccaggaaataatcaaactgagggctgatatcaataaattagaaactaggaaaacattacaaagactcaatgaaacaaagaggtggttctttgagaagatctacaggatagacaaacctctatccaaactaaccaagaggcagaaagagagcatgctaattaacaaaattagaaacgaaaagggggatataacaatggacacagagaatcatcaggtcatactttgaaaacctgtactccacaaaaattgaaaatctaaaggaaatagacagtttcctggataaatatcacttgccaaaattaaatcaagaacagataagcagtttaaatagacctataatccctaatgaaatagaagcagtcatcaaaagcttcccaaccaaaaaaaaaaaaaaaacaaaaaaacaaaaaaaagcccagggccatatggcttcactgcagaattctatcagaaattcaaacaagagctaataccagtactcctcaaattgttccacacaatagaagcaggagggacattgccaaactctttttatgaggctacaatcactttgatacccaagccacacaaagatacaactaaaaaaaagggaactaaagaccaatatccctcgtgaacatcgatgcacaaatactcaacaaaatattggtgaaacaaatccaagaacgcatcagaaaaatcatccatatgatcaagtaggcttcatcccagggatgcaaggatggttcaatatacaaaaatccatcaatgtaatccaccatataaacaaacaaaaaaagaaaaaccacataatcatctcacaagatgctgaaaaaacctttgacaaaatccaacatcccttcatgataaagatctcggagagaacaggaataacaggaacatatctaaagatgataaaagcaatgtacaccaaaccaacagccaacatcaaactacatggagagaaactcaaagcgattcctctaaaatcaggaacaagataatgctgtccactctctccatatcttttcaatattgtacttgaagttttagctagagcaataagacaagaaaaggagatcaaagggatacaaattggaaaggaagaagtcaaactttcactatttgcagatgatctgatcgtctacataagtgacccaaaaagctctgccagggaactcctacagctgataaacaccttcagcaaagtagcaggatacacaattaactcaaaaaaatcagtagccctcctatatacatatgataaatccaatgagaaagaaatcagagaaacatcacacttaacaatacccacaagcaacataaaatatcttgggggtaatgctaaccaaaaaagtgaaagacctgtacaataagaaatttgagtctttaaagaaagaaactggagaagataccagaaaatggaaagatctctcatgctcttggataggtagaatgtaaaaatgacaattttgccaaaagtaatcgacagagtcaatgcaatccctatcaaaatcccaacacaattcttcacagaccttgaaagaacaatactcaactttatattaaaaaagcccaaaaaacccaggatagcaaaaacaattctgtacaataaaggatcttctggaggcatcaccatccctgacttcaagctctattatacagacatagttctgaaaaaagcttggtattggcacaaaaatagacagatagaccaatggaatagaattgaaaaccctgttattaatccacacacctatgaacacctcattttttgacaaagatgctaaatctatacaatggaagaatgatagcatcttcaacaaatggttctggcacaactgggtttggacatgcagaagattgcagatagatccatatctgtcaccatgcacaaaacttcattgcaaatgaatcaaagatctcaacataaatccagccacactgaatattctagaagagaaagtgagagaaacccttaaattaattggcacaggagaccatttcctgaacattacaccagtggcacagacattgagacctgcaattaataaatgggacctcctgaaactgagataccacctcacacctgtcagatggctaacatcaaaaacaccaaacacaatctatgctggagaggatgtggagaaaaaggaacactcctccattgctggtgggagtgcaaacttgtaagaccactttggaaatcagtatggcagttgctcagaaaaatgggaatcagtttacgtcaatatccagcaattcctctcttgggcatataccaaaataatgcatggtcatacaacaaggacatatgttcaaccatgttcatagcagcattgtttgtaacagccagaacctggaagcaacctagatgcccttcaactgaagaatggatagagaaaatgtggtacatctatgcaatggagtactactcagcagaaaaaagcaatggaatcttgaaattcacaggcaaatggatggaaccagaagaaatcatcctgagtgaggtaacccagtcacaaaaggacaaacatggcatgtactcacccatatgaattttagacatagagcaaatgattaccagcctacaatcctcttcatcaaagaaactaggaaacaagaaggactctaagggaaaaatgcatggatcccaggaataggaaggggcaggaactcctgagctaattgggagcatgaaggtattggagagggagctgccagaatgagaggagaagaggagaggaaaggaggaatgggggagcagaaatattgagttggtggacgaatacaggagagcaggatgtgagataccatattagagggagccattataggtcggaggagagatctgacactagggagatttccagagacaaggatgacacgaactgacaatccaggcaatggtagagaggataacctaaatgcccttcctctataatgagactgatgactactttttataccatcctagagccctaatccaatggctgatggaagcagaggcaaacatccacagatatacactgaactgaactctggaacttagttgcagagagggaggaatgaagatcaaaggagtcggtatcaggtttgtgaaacccacagaaacagctggcctgaacaacggtgaacacatcaaccccacactgctatctgggaggccagcatgggactgatccagacccctgaacatggatgtcaatgaagaggcctttgcactctaggaggccactggtagtggattagtattttccctggtgtaagaagggactttgagagcccatcccacatgaagggatgcactcttggcctggacacatgggggagggcctaggcacagcccaggatgatggggtagactttgggtagcccctgtggagggtcctaccctgcctggggagtggagggtggatggggataattcgaactaataaaaaaagaaaataaaaaagaagtgtatgttttttttatttaaattagaaacaagcttcttttggttcaaatactatttgttcttctttttgttgttttatatgtttgcttgtttaatgagttgagcacaattgattatttttaattatcatttgttcctcttctgaaacacaaactttccaaggttcttatgagggtgtctgtcttcagtccttttctggatataagatttcttacagtatctcccacagttctgaattagttgtcatgaattcctttgatctatgttgatcttacaaggtctctaaattttccaaagactttaaacaacaattagctaattgtaattatggctggaagttgttttgtttcagggagttgttttatttccaagttttaggatttctttcttggatttcagggtttctattgagaaatctaatgtagctcttgacattgtaaatttgcatttgtctcttgtagtgttcaatagtctcttgctgttctttttgtgtctctgtctttgtgtgtgaaagtgttttctttttgtcttttctttttatttaaactagaaacaagcttgttttacacatcaatcccagttctctctccctccccttctcccctgccccttaccaactcccctattccattccctttctgctccccagggagagtgaggccaatccggggggtcttcaaagtctgacatacaatttggagcaaggccttggccctcccccacgtgtctaggctgagacagtatccctttatgtggaatgggctcccaaagtccattcctacattaggaataaatactgatccactacaaaggccccattgattgcccaggcttccacactgacacctacttccaaggggtctggaacactctatgctggttttccaactatcaatctggggtccatgagctccccctttttcagttcagctgtgcctgtgggtttcttcagcctggtcttgaccccttcactcatcacacctccatctctgcaacaggattccaggagttcagcaaagggtttagctgtgggtgtctgcttatgcttccctcagctactggatgaaggctcaaggatggtatataaggtagtcatcaatctcattatcagaaaagtgcatttaaggtagcctttccactaatgcttagattgttagttgggggcattcttatagatctctggacatttccctggtgacagatttccttttaaacctgtaatagctccctatattatgatatctcttttcttcctctcctctatcccaccctgaactcaatctcctagctccctcatgtcctcctcttccttcctcttctccctttctctttctcctaactccctctctcctcccccacgctcccaaatagctcaggaggtcttgtccctttccctttctctaccatgtatatatctcttagggtcctccttgttgcctagcttctctggcagcatggattgcaggctggtaatcctttgctctatatctaaaaacaatgtatgagtgagtacataccatgtttgtctttgtgactgggttacctcactcaggatgagttcctctagttccatccatttgcttgggaatgtcaagattccattattgttgttgtttttttaatttagcatcttagctataatgtgtagctaatggtttttttctgatcacatttatttgtgtattgcatgcctcttgtatttgaatatccctgctttcccttcagtttggaggattttgtactacaattttagtgaagttgatttacctgcattgagtttgtatttctgagtgtgtatatgtacaaaagggattcttctgttaggtcttttcatccaagcccacagttcttgagattgtagtcatgactgcaaaaattcttagggctggcagcatgtaagtctaaaaagtcttaggccttgtttttgatatctgatatttttctacttcctgtagtaaattgttgatgttaacattgagtttctttgaattattgatatattttccatgatttctaaaatatttatgtatttttgtagtcatgcattccttgatctacttcttacctaagttattgaatttctgttctaagttttaatattcttacttcattaatctgtttacttatggtttcttgtaattcaatgaccattatgaaaatgagactttttaatacacagtccagattttcaactgtttcaatacttcagatattgagtatttatgaaaatattaggaatctcaggtatttacatgtcctatgctacaattttgcagatattagtatctgcatacaatatctcttgcaaatgttaatggggttcttttagtaggcaaccttcttttatttttacaaccttgattaatacctaaaggagtgaaagcctacagccgtaataaaaacaaatatgtaaaataaaactaaatatttttcttttttacttgaattataaacaatcttattatttttttgttttctgagacagggtttctctgtgtagctttggaggttgtcctgggactagctgtgtagatcaggctggcctcgcactcatgcactcatagagatctgcctgactctgtctcctaagtgctgggattaaaggtatgtgccaccaacgcctagctgtaaacaagcttcttttacatatcagtcttagttccttatccctcccctccttccctgcctcctactgacccctatccaaactcctttcagctccccaaagggggtgaggccttccatgggggaaatcttcaaagtctgtccataccatttggaacagggatgaaaccttccccagtgtgtctatgctaagacagtgtggaaagggctaccaaagtacatttgtatactaggggtaaatcctgacacactaccagtggtcccatagtcagggctccaaacagacttctggcttcagggggtgtagaacagtcctatgctagttcctaactatcagtctggggtccatgagctccccctttttccggtcaactgtttctgtgggtttctccagcctggtcttgacacctttgttcatcactcctccctctctacaactggattccagagttcagctcagtgtttaactgtgagtgtttgcttctgcttccatcagctactggatgaaggcactaggatggcatataaggtagtcatcaatctcattattggagaaaggtatttaaggtagcctctcaactattgctaagattgttagttgtggtcattcttgtagaactctggtcatttgcctagtgccagaattccctttagccctataatgactccctctttgatggcatctcttttgttgctctcctctattcttcccctgactagatcttcctgttccctcatgtcctcctctccccacctcttctccccttctccttcttctaactccctctcccatccccaaatgctccccattacttaggaaatcttgttcccctctacttcttccagggactatgcagtcttctcttggggtcctccttgtttcctagctcctctagcagtgaggattgtagactttgttctatgtctaaaaatcatgtatgagtgagtacataccattttttgcctttttgtgactggtttaactcactcagggtggtttcttctagttccatccatttcctgcaaatttcaagattccattgttatttcctctgctgagtagtactccattgtataaatgtaccatattttctccatccattattcagttaaggggcatgtaggttgcttccagcttctggctattacaaataatgctgctatgaacatggttgaaaagatgtccttgtatgaatgtgcatctttgggtatatgcctaagaatggaattgctagatcttgtggtacattgattaacatttttctgaggaacctccatacagatttccaaagtggctgtacaagttgtcattcccaccagcagtggaggagtgttccccattctccacatcctttccaccataaactgtcattgttgttttcgattttaaccattcagacagtaataagatggtgtctcagagatgttttgatttgcatttccctgatggctaaggatgttgaacattttcttatgtgtttttcagccattttagattcctctattgagaattgtctatttagttctataccccactttttaagtggattagttggtgttttggaaactagcttcttgagttctttgtatattttggagatcagccctctgtcagatgtggggttagtgaatatcttttcccattcagtgggttgctattttgtcttgctgactgtttcctttgccttaaagaagcttcccagtttcaagagctcccatttattaattgtcaatctcagtgtccgtggtactggtgttatgtttagaaagttgaatcctgtaccaaatcgttcaagggtaccacctaacttctcttctaagaggctcagtgtgactgaatttatgttgaggtctttgatacatttggacttaagttttgtgcatggcaatagatatggatatatatgcagtcttctacatgtcagcatccagttatgccagcacaatttgttgaagatattttcttttatttcaattgcataattttagcttctttgtcaaaaatcagggggcagaccactggcatcaagtgtccctatgaattttgagtctttaaagaaagaaattaaagaagatgacagaaaatggaaggatctcccatgttcttcaataggtaggatcaacatagtaaaaatggcaatcttgcattgtgcgtgggttaatacctgtctattttggtgccaatagcaacatgttttcatgaatatagctctagagtagatgttgaagtcagggatggtgaaacctccaaaggttcctttattgtacagactgggttagcctaacctgagtctttgtttttccatatgaagttgagaattattcattcaagtacctttaagaattgtgctgggattttgatagtgattgcattgagtgtgtagattgcatttggcaaaattaagagaaaatattaagatcaaggtcaaataatatataaaggcaaaactatgagaattacacctgacttttccatggaaactctgaaagccagaaggtcctggatagatattctacctacactaaaagaccatggatgccagcccagacaactctacccagcaaactcaatatatatggtgaaaacaagatattccatgacaaaaccagaataaaacaatacatatccaccaatccaggcctacagaaagttctggaaggaaaactgtaacccaaggaatttaactacaaccagaaaaatataggcaatagataatcccactttaccatcagacaaaaggaaaaagggatggaatcccacaaataatttcaccaccacaaccaaatcaaaaaaaagcaagaatgagcaatcaatggtaattaatatccctcaatattaatggtattaactcgcatataaaaagacacaggttagtagtatggataagaaggcagaatccatccttcttctgcatacaagaaatgtacctcaacttcaaagacagatggtacctaagaattaaaggttggaaaaagatcttccaatcaaatggacccaagaaacaagtaggggtagcaatcctaatatccaacaaattggactttaaaagaaaataaatcaaaagagttgaaaaacatcacatccgactcatcacaggagaaatccatcaggatgaagtctcaattctgaacatttatgccccaagtacaaagaatccatgtttgcaaaaaaaaaaaaaaaccaaaaaacaaaaaacattactaaaactcaaatcacacataaaaccgcacacagttatactgggtgacttcaacacaccacttttaccactagacaggaacactggatggaaacttaacaaagaaacaaaggaactaatagaagttatggcacaattgagcttaacagataactatagaacattccatccaaatacaaaacaatataccttcttctcagcaccacatggaacctattctaaaatcaaccacttacttggcagcataccaaacctcaacaggtacaaaaatattgaaataaccccctctattttatcagaccaccatgctttatagttagaatttaacaacaaaacaaattgtagaaaacatacaaactcatgaaaattaagtaacagtcaatttcacaactcctgggaagaggaagaaataagaaaagaaatcaaagatttcttagaattcagccaggcattggtggcacacacttttcatccaagcactcgggaggcaggggcagatggatatctgtgagttccaaaccagtctgatctacaagaactagttccaggacaacctccaaagtcacagagaaaccctgtctcgaaaaacaaagacaaaaacaaaaacaaaaacaaaaacaaatgatttcatagaattcaaagagattgaggacacaggatacctgaacatatggaacactttgaaagcattgctaagaggaaagttcatagcgctaagtgtccacacaaagaaataatcacactagagaattaacagcaatactgaaagctttagaacacaaagaagccaatacaccccagaggagcagatgccaggaaaaaatcaaattgagggctgaaagcaataaaggagaaactaggaaaacaatacaaagaatcaatataacgaaaagttgcttcctccagaaaatcaacaagataaacaaacctttatccaaatttaccaaatgggagagagtgaaaaagcaaataaataaaataagaaatgaaaaggggacataacaacagacacatagaaatccagagaatcatcaggtcacactttgaaaacctgtattcctcaaaattcgaaaatctaaaggaaatagacaattttctagacagatttcacttaccaaaattaaatcaagaacagataagcaacataaatagacctataacccctaatgaaatagaagcagtcatcagaactctcccaagcaaaaaaagcccaaggccagatggcttcagtgcagaattctaccagaaattcagggaacagctaaaaccaatttgcctcaaagtattccacataatagaaggagaagggtcattgacaaactctttttatgaggcttcaataaccttgatacccaagccacacaaagacacaaatatgaaaaagaactacagaccagtaaccctcatgaacattgatgcaaaattctcaataaaacactggaaaattgaatacaagaacacatcagagaattcatccagcatgatccagcttcatcccagggatgcaaggatggttcaacatatgaaaatcaatcaatgtaatccacaatataaacagactgagaaaaaaaaaccacatgatcatctcactagatgctgaaaatgcctttcacaaaatacaacaccccttcatgataaaggtcttggagaaatcatggatagcaggaacatacattaacataaaaatgcaatatacagtaagcctacagccagcatcaaattaaatggagagaaactcaatgcaattcctctaaaatctcagacaagacaaggctgcccactctctccttaccacttcaatattgtccttgaagttctagcaagaagaataagacaccaaaagaagatccagggaatacaaatcagaaaggaagaagtcaaactttcactatttgcagatgatatgatagtctacataagtgacctgaaaaactcaaccacggaactccaacagctgataaacatcttcagcaaagtgtcaggatagaagattaactgaaaaatatctgtagccctactatatacagatgacacattcatagagaaagaaaacagacaaacatcacactttacaattgccacaaacaacataaaatgccttgggataacgttaaccaaacatgtgaaaacactgtactgtgagaattttgaatctctaaagaagaaattaaagataccagaaaattaaagagcagaaaattctttctgctcttggatgctcttggaaaggtagaaacaacatagtaacaaatggcaatcttgccaaaagcaatctacagattcaatgcaatccccatcaaaaacccaacacaattcttcacagaccttgaaagaacaattctcaactttacatggaaaaatcaaaagacccaatatagccaaaacaaccctgtaaaatacgggaacttctggaagcatcaccatcgctgacttcaaactctattacagagctatagtcctgaaaacagcttggtattggcacaaaaatagacaggtagaccaatggaatagagttgaaaaccctgatattaacccacacacctatgaacacctgatttttgacgaacaatcaaaatatatacgctggaacaaagtgaacatcttcaacaaatggtagtggcataactggatgcggacatgtagaagactacagatagatgcaagcctttcaccctgcagaaaacttaagtcaaaatggatcaaagacctcaacataaatccagccacactgaacctttagaagataaagtggggaatacgattgaattaattagtacaggagactgcttactgaacattacacccgtagcagagacactgagatcaacaattgaaaaagggaccctgtgaaactgagaagcttctgtaaggcaaaggagacagtcagcaagacaaaacggcagcccacagactgggaaaatatcttcaccaatcccacatctgacagagggctaatcttcaaaatatacaaagaactcaagaagctagtctccaaaacaccaaacaatccaattaaaaagtggggtacagaactaaatggataaatctcaatagaggaatctaaaatggctgaaagacaaataagaaagtggtcaacatccttagccttcaaggaaatgcaaatcaaaacaactctgtgattccatcttattcctgtcagaatggctaaaatcaaaaacaccaatgacagtttatgctggaaaggatgtggagaaaggggaacactcctccaatgctgctgggagtgccaacttgtacagccactttagaaatcagtatggtgaatcctcaattaaatggcaatcaatgtaccacaagatccagcaattccactcttaggtatatacccaaaagaagcatattcatgcaagaaggacatctgttcaaccaacttcatagcagcactatttgtaatacccagaaactggaagcagcctagatgcccctcaacttatgaatggatagagaaaatgtggtacatttacccaattgagtactactcagcagaaaaaaaaaatggaaccttgaaatttgcaggaaaatgaatggaactagaagaaaccattctgtgcgaggtaacccaatcacaaaaagaaaaacatggtatgcactcactcatattggattttagacatagagtaaaagacaaacagcctacaattcacactgccagagatgctagtaaccaaggaggaccctaacagagatatacatggtcccctggagaaggggaaagggaaaagatctcctgaataaattgggagcacaggaagaggggggagggagctaggtgaatgaggagagaagaggaggggtgaggaagacatgagggagcagaaagtttgtgtcaggggaaggatagaagaaaacaagaatggagataccataataaagggagacatttgaggtttccagagaaatcaggtaatagggaaatgtctggagatctgcaaacatgacaccaactaacaatctaagcaacagaggagaggctaccttaaatgccctcccctgataatgagattgatgactgacttatatgccatcagatagccctcatccagcagctggtggaagtagaagcagacacccacaactaatcactgaactgaactgtaatccagatgcagagaaggacgagtgaagagcaaaggggtccagaccaggctggtgaaacccacagaaacagctgccctgaacatcgcagaattcttgctctgtagactgatagctgggataccagcatgggactgatctagaccccaggaacatgggtgtcagtgagaaaacctctgaaatctacaggacctcctgtagtagttcagtacttatctgtatcataggtgtggactttgggaacccattccacatagaggaatactccccgagccaagacacactgggttgggcctaggccctatcccaaaggcatacaggatgcttatgaagcccctctagatatgattctagtgagggtatttatgctaactcacagcctcaggctgaatatgaagaccatatactgtccatatgcaggaaagcagcattaaacacctgggataaggttcgtgagccaggagaacacctagaatcttataacagaatagaacagggacctacagaacagttctaggactttttacagaggttaactagggcattagaattacaggtaacagatctagaaactagaaaattaattgtatatacagtagcttatgaaaatgcaaacccaatatgcaaagagtacttttgactttaaagatcagatcagctctgctagaagaatgggttttgtatgcaaccaacattgactataatgtgcaagatactggagcttgggtaggagaagccatcttgaaaggtttgaaaaggcaatcggagattaaaagttctagaggtgaggatgcaagggattgggaaggagaagcaacttacagaggtcaacataggtaccaagaagttagatgttactactactatgaaccagaaccttgggtaggaagagccttcctcaggagaccaagaaggcaccaggaacctagatgtttcagctgtggtagaatgggacatatcaagagaaattgtagacaaaagatttctaacaatgactcatacagaaggccactgccttctggattgtgtagaagatgtggtaagggctgacactagaccaacagttgtagatagatcatggacatgaaaggaaaccggttaaggctgggaaacactgaagggggcattaagaagtccccacattgagaaagttccggtcattcccagtagcagtggaagacaatctctcataggacgaatagataattctttgcctattgtgaaaaatgatactgctctagatggtggatagtgatgaagaatcaaatgtgaatggccaaaatgagaaatgcatactttggcaaacttctattaatgataaaagacctcagttgaaattgaaaattaattatacagttactactggattagtagacactgaggcagattgactattattaccgaaaagtcttggcctcagaaatgaccacttagagagtcaaatgtacaatttttaggaattggaattctatctagagttcaacagagtgttaacttggtggtctgtattggaccagaaggacagacagggagattgaaaccatatgtggcagatatagatgtaaaactctggggtcgtgatcttttacagcaatggaatactcagattaatattcctccagtgtcatatacaaattatgtacaatctttatatactagaaaagatctggtaagacgctatggaaaatggttaccaaccatccaggctgtatagaaactaaatacaaatgacagaccttcagaagtgccaagggccctgccgatgaagtggcttacagatgaacctgtttgggtaggtacaaattagaaggcattgatatcaaactcttaattctcttcaaaaagtattaggggaaatttctcaactacagacgattattggtgaagaaggacataaatcaaatcattgaaaatgacccttaaatgtgataaggacctaaaaagtctgagaatattatctgctaagcaagaaaaagagttacaatgggtagaaaaaagaatattggatgcttatgtagatcagataaaccttaatatttatactctattctggttatcttgccatccagagaatacccttctgggtttctgatgcagaaggaagacaccatattggagtggatatttctgccacataaacagaataaaaagttaaagacatatatagataaaatttctgatttgattttaaaaggcaaattaagactttgtcaccggactggaaaagattcagcagaaattatagtacctttaactaatgaggaaatttcctccttgcggaaggataatgaatattgacaaatagctcttactgacttttggggaatgattagcaaccactatctcaaaactgacagaattaaattcacaaaaaaaagacagtctggattcctggatatctgtaagttccagagcaacctggtctataagaactaattcttaccatttacactgatgccaacaaataaggtaaggtaggttataaagcaggtgaggtaagtaaagtagctcaaagtccgtataaatctgtacagaaggcagaattatatgcaatcctcatggtacttatggattttacagaacctcttaatatagttactgattatcattatacagagagagtcaggttatacattgagactgcacaattcgttcttgataatacagaattaacttcattgtttatacaattacagggaacaatctaaaacagaagtaatcctatatatattacacatatcagatcccatacaggtctgcctggcccactagcccaaggaaatgatgaggttgattgtttattaattggaagcttactagaagcctcagaatttcataagaaacatcatgtaaatagcaaaggtttgaaaaagacttctccattacttggcaacaagccaaggagatactgagaaactgacctacttgttcttttaataatcaaactccattggcagcagattataatccgaagggcatttggagaaatgaggtttggcagatagatgtctttcactttgcagaatttggaaatttgaaatatgtgcatcatactatagacacattctcagggttccagtgagctattgctcttaactctgaaaaagctgattctgttattatacacctgctagaggtgatggcagttatgggtatacctgcacaaataaaaactaacaatgctccagcatatnnnnnnnnnnnnnnnnnnnnnnnnnnnnnnnnnnnnnnnnnnnnnnnnnnnnnnnnnnnnnnnnnnnnnnnnnnnnnnnnnnnnnnnnnnnnnnnnnnnnnnnnnnnnnnnnnnnnnnnnnnnnnnnnnnnnnnnnnnnnnnnnnnnnnnnnnnnnnnnnnnnnnnnnnnnnnnnnnnnnnnnnnnnnnnnnnnnnnnnnnnnnnnnnnnnnnnnnnnnnnnnnnnnnnnnnnnnnnnnnnnnnnnnnnnnnnnnnnnnnnnnnnnnnnnnnnnnnnnnnnnnnnnnnnnnnnnnnnnnnnnnnnnnnnnnnnnnnnnnnnnnnnnnnnnnnnnnnnnnnnnnnnnnnnnnnnnnnnnnnnnnnnnnnnnnnnnnnnnnnnnnnnnnnnnnnnnnnnnnnnnnnnnnnnnnnnnnnnnnnnnngagttgaaaaggaaaaacctcttgacgaggagaaatgacaggtattctattaaagcatatctcataaactaaaaagaaacctcccaaaggagagggaagtgttttgtttttatcttcacaggaaaactcattgccagaagtcaaaggatactgcatgggtagatatttaagaagagaaggtagctataaccatcaaacaaaaggaacagtaacatgccattacagtaaactttatagctgtttctcaaacgactctatttctctttatttcctagtccctattcaattaaaccaatgctggctttagaggtggatttggctttcctcctctaaaatccaagcatgttgtttaactaaacctcagagtttcaatattatatcaagaagccaattgatgtaatacagaataagaaaaaaatttggggactgtctttgtcttttcttggctctttgttcaaggtgtacaccctctcataattgttatgctcccattgttgccttttctagtatacattcttacacaaacatttctctgctgacattatgtttgagtcccacacagccaatgaagacctgcctgacagaaaaccctggattccccagaaagaaaatgggccatacctccttgactgcactggatccaacttgctccatttcaactgacactctggccaaagctttgagtgctgacttcaatcaagtagaggatttcaatcaagatcttcaatcaagcaaatcccatctaacatggactggatacaacccattcaagactttcactacactaacattttcttcctatagtaccccacaaggctattgccctcccgttccagcaggaagtatcttggaggatgctatgctccctttcccccattgttgtcatttaggatatgtacctagttagggatagcttcctattgtttatggttgggattggaaggaggtgttcaggcttggacacatctttcagatgactttagagtttaattaaaatagacataggaagtgattgaagcagattgttgtatcttcttacatttcacctttatgattgctaattttggatacttcacactgttaagttttaatcctcttttagactcaaagggtaattgtagcagatgctgtagtcaagcctgcttaggggctggctacaggtgtgcctgaccacacctgtgagggcgtggtcagggtgaggtagagcgagggacgcttacgtggtggcatgctttcgctttcgtctttggtttgctgtatggactgctgccctgctggctggctaggtcactctgtaagtaaggctttccctattaaattcccttgtatttttacctgtctctgtattggtaattccccacattaatcatgtagttattctttctcagtctgtttatatggtgtattacattgatggattttcatatgttgaaacatccttgaatccatgggatgaagcctacttgatcatggtggatgatttctctgatatattcttggattcaatttgccagtgtttcactgaatattttgcattaatgttcatgagtcatattggtcttcagttctccttcttgattgtgtcttagtgtggcttgggtaccaagataattgtagccttgaataaagagtttggcaatgacccttctgcttctgttttgtggaatactctgaggagacttggtattatctgttctttgcatttctagtagaattttgcactgaagccatctgaccctgggcttcttttggatgggagacttctgatgaattcttctattttattaggagttataggtctatttaaatagcttatctgttcttgattcaattttggtaagtgaaatctatccagaaaattttccattttgtttagatttttgaattttgaggaatacaggttttcaaagtatgacccgatgattctctgcatttcctctgtgtctgttgtaacatccccttttcatttctgattttattaattttcatgttcacttcctgctgtatggtatgtttggataaaggtttgtttatctttttgattttctcgaataaccaactctttgttatattgataattttgtattgctttcctagtttctactttattgatttcagccctcaattttattatttcctggcatctactcctccaggttgagttggcttctttgtgttctagaactttcagttgttttgttaattctgtagtgtgattattctccagtttcttcatgtgggcacttagtgctatgaactttcctcttagcacactttcaaagtgtcccataattctggtatgttgtgtcctcattctctttgaattctaggaaatctttaatttcttttttattacctcattgacccaggaatggtgcaattgggcattattcaattaccataagtttgtagggtttcttcaatttgtgttgttgttgaattctaactttaaagcttggtggtttgataagatacaggggtttattctaattatttgtatctgtataggtttgccacattgctgagtatgtagtaattttatagaatgttccatgtggtgctgagaagaaagtatattcttttgtatttgatggaatgttctatagatatatgttaaacccaaatgggccataacttctattaattcctttgtttctttgtttattttatgtctggtgttcctgtatagtggtgagagtggggtgttgaagtctcccaatataagtgtgtgaggttttatgtgtgatttgaattttagtaatacttgtttatgaatgtggatgcctttgtatttggggcatagatcttcagaagtgacagttcatcctgatggattttcctgtgatgagtaggaagtgacatccttcatctcttttgatcgattttagtttgaagtctaatttgttagtatcagcattgctactccactttgcttctttgacccatttgattggaatatcttttcccaaccctttactctgaggtactgtctgtctttgaagttgaggtgtgtttcttgttgtatgcagcagaaggatggattctgtctttgtatccattctgctagtctgacttttagacattttatggccattaattttgagggatattaatgaccattgattgttcattattgtttgttttggatttgtttgtggtggtagaattgtttgtgaatttccaccccatttttcttttggctgttggtaaagtgggattatctattgcttgtgtttctctggttgtagttaacttccttgggatggacttttcattccagaactttctgtagggatgtattggtggatatgtattttttaaatctggtttgtcaaggaatatcttgttttctagatctatattgattgaaagctttgctggttgtagtattctgggatggcatctgtggtctcctagtgtaggtagagtatctatccaggtccttctggctttcagtatttccttggaaattcaggtgtaattctgataggtttccctttatatattacttgaccttgatcttaatattttctcattattctgtatgtttggggttttgattattatgtggtgaggagacattttttgtggtccactctattgggtgctctgtaggctttttgtactttcattggcatgtctttctttatgttgggaaagttttcttccatgattttgttgaatatgtttttgcacctttgagttgggtttcttcaccttctatacttactattcttaggtttggttctttcacagtatcctatatttcctggatattttgtgttagggatttgttggacttaagattttctttggtccatgagtctatttctactagtgtatcttcagtgcctgagattctctcttgcatctcttgtattctgttggttatgctttgcatctgtagttcctgcattccctcagattgtgctttctttattgtttgtatttcagtttttaagtcttgaactgtttccttaagaggtttgttgatttcttggggtgttttctttttcttccatgtctttaagatgtttctcatatcttctttgaggccctctatcattttcattaagttgtttttaaggtcattctcttctgcttcacttgtgttatgatgttcaagtcatgctgatgtagagtccttagactctagtggtgtcatattcgtttttctgttattaaatatgtttgtatattttcttcttcccatcccttcttctggtgggtatataaggagtctcttcctctctgggtggttacaggaccaagctttccttctggtgggtgcacacagctgcaaaacattgatgtcgctcctcttcccatggatggaggcaggactgggtctctgggtgggctgcatcctacctagatgggatctgcagtgagcagtccccaggactcaggtgtatctgagcagtgcagaggaaggcaggctggaaacagacccaagcttaactagtcctgtggacagaagaagggactaggaccctgcagactctgggtgggctggatgctgctggaatgggatccaaacagggtgcagtcccaggcctcaggtgtctccaaggacagaaaccaaggcaggtgggccagacacaggcccaagcatacctagttctatggtggatggaagtcagactggtacctgggccttggcagtctctgggtgagctggatcctgctgggatgggggtatgctgtgagtagtccccaggcctctaaaagtagatatttaaacatagttgaaaactatcaactttactcacagtaagatttaatgcaaaggaatgagtttgcttatataattaataggagtttaaaaattgtcaaagttttggtcttttatataaggaatttatatttaaaagtaaaaaatatataagaagggaagaaactatggggaggaggtagacaactgagatggaggaaaggagaatggggaagataatggaaggaggatatgagggaagtgtagtggtattgatgtaaaaatgccatagcaaaacctattacattttatgctaactttaaacaattaacataatcagttaaaattataaacaatgaaagcgttaatagttaagtgacaaaaatggggttggaaaaggaaagagagaagaagcaagatgaaatatgtatgaaggaatgaaggtagaatgtagatgaaagtaggaaaacattattttgtgggtctgaaaaataaaacaatacagaacaatgcaaatcctgaggctggttaatcttcttctctggggagatgaagtcagaagtctccaggcttttctcaacatttttaattactagaagtgaatgtggagtgagaggaaacatctaagtgggttgggctagaaagggctgttaccatgcatgcacattactgtgagcactgctgaggtgagtttgttctagtgcttctgtattcagatataggaatgtagggggatcagagaccacttttcatcattctcacaagctgaacctgagggtttccaaactgcatgccctgtcacacaatgtgtgtatggccatgagaaataccctcaatacccaatgtctttgacattctaagaatgtagaattcaagccaaagcaagttgcatggacaggtaaggcaatggccccgagaggctcctcacacatagctgttctccccagaggtcaggttgaagttatggaaatacagcatccctcagctatcttttgtactgcagtctccccacactccacctcaacaaagccgtgctgagggtcagtgtctgagtcacatctacttcctttagctctgacggtatttcagggtgttctcttgcttagctagtggagatgaggatgtctggaatttggagaaataaaatgtaataaaggtcttctactttcctaggtaaaaggcttgatgataaaacccttccaaaatgactttccatagcagtatcattacacatgtgcttccaagtaatgggagaggtccttctgtatgctgtgaatatatgtttctattattggttgatgattgaagctggttttgctaatggataggcaagatgtagcaggcaggaagtataggcagggctaccagactaggggaatgcaggcagaagaaacacagagagttgcccaggagatgccatgtagctgctgaagtagtagcatgctagagcattatggataatttacagccttgtgacaatacatagtttaatagaaatgggataataactaagaaagaactagccaataaaaagtctgagccattggccaaacagttaataattaatataagcctttgtgtgtttacttgggactaaaaagctgtggaaccaggagaaacagaaaattatgtcatcaaatgatacccaacttccatcatcatcacagtgctacaatgttgatggatttcatctaggcagcaatttctctttttgtgatgcccttttctctttcnnnnnnnnnnnnnnnnntgacaccttatgttagcgtctactgagtccatttgagattgctttgtgaatatgaacatacaaatatgtaacaataatagttataaaaaagaagagattatgaacttgaggagtggggatgacatgggaagaattggaaatggggagggatgaatggaaatgatgtaaatatgatacccatgaaattctaaaacataatttaaatggataaaaagaaaagataaaacaggaatactaatatgacagttcttgacttggatgctgtcattgtgctgaatatactgtcatttgtagcagaaagtaaattgatctttattttatagttcaaaaaattatactaaccatgcttcaaaccacaaagaattatagatcataacacccaaattttaacttgttttatagtccatcaggatgggaatatcaccttagggtacaatttattttccttatcataaaattctgccaccattagaaacttcatataaataaaaaaatgagccccctgcagaggtaatgaaagcaaattcattcaatcttccttctgatgtgtcattctagctcttttgacagctgaaaatactaaattgcaatcaaatgcctatagcacaggagtgaaaaatgcaagcattaagcaaatttctttacatgaaataattaacagtgtgtaaagattcaactcagtggtttataagatgtaagaacatgatctaaaacaatttagaattgcaaagcataagaagcatatgtcatgaggctgactgaggaaatggactcacatgctctccgttttgtttgtcttttccaaattcatttacttttaagggaaataaaaatgcacttatagagatagctatgtggttaacagtaccttgtgttcttgaagaggacctgatttcacttcacagcacctagtctgggcagctcacaagtgtaggtcactccacttccagggaaccagacattatcttccaacttcagagaacaccctcacatatgccagacactcacacagatacacacactaaattaacaaataaataaatctcgtttatcaagaaatcaaaacacaatgcacattatgacttataaaggatgaccttagtctttcttctctgatgacatgtagaagtgacaaccttgctctctaggcataaacaactttgcatgtaagaagtaggagaccagactacctcaagatccagcaattcctctcttgggcatatacacaaagaatgcatattcatacaacaacaacatataatcaactgtgttcatagcagcattgtttgtcatagcctgaacctggattcaaccaagatgcccctcaactgaagaatggatggagaaaatgtggtaactttacacaatggagtactactcagcagaaaaaaagcaatggaattttgaaattcgcaggcaaatggatggaactagaagaaaccatcctgaatgaggtaacccagtcacaaacaaaacatgagccttcatccagtggctgattgaagcagatgcagacactcacagctaaacactgaactgaactctggaacccaactgcagagaggtaggagtgaagagcaaagaggtcgggaccaggctggtgaaacccacagaaacagctgacttgaacgagagggggtgcatagatcccagactgattgggaggccagcatgggactgattcagacccccctgaacatggattttagtgaataggcctcagcactctatggggcctctggtagtagaccagtatttaaccgtgatataagaaagggctttgggagcccatcccatttggaaggatgctctctcagcctggacaaatgaaggagggcctaggccctgaccagaatgatatgacagacttgtgggtatcccacatggaggggcttaccctccctggggagcagaagggggatggggagggaattagtgaagggaggggaggaggggagggaaatggagcaaggattgacttgtgaagcaggcttgtttctaatttgaactaataaaaaataatttcttagaaaaaataaagaagggaaaaggaagacaaagatatagaatacttttaaatgaaccacttaatttagttcggccattcctgaagtaattaaaattctacacaaggcattgcaacaccaatgtgtaaatgaaaaagtgatatgaatgttcttaaagtttatattaattctgacatgttaaatttattaaatatacagatagaattgaaattaaggactgaagaagaattgtcccctatttgttgttgttgtgtgtgtgcatgtgtgtgtgtgttatgtgtgtttatggatgtggggtgcattcaaaggcaaaagacaacaaaatatacaccttgtattttaaagtggcctagaacttgctggcctagaacttagtatattaagacaggttagatgactagccatgcccagggatctgtctatatccacttacccagtgatgggattacaatatgtgcactgtatctggatgtttctatatatgtgggttttagacatcagtctcatatctccatgtgtatgaactttaccagcatcccacagccaaaacagctgtttgcaataatgcactcaacaacatattaaccctgagttttctagtaatctggatcctttaagcataatctctgaggaatgaaatggttacacttggggacttgagagacaatggctagacataaaattttactccaggaaagatgatctatcatagactaatgggaccacttctctatttcaaaagttacatttaatattagcaagagaaaaaaattcaccacaactgataaagtgctgtaactaaccccacacattttacaagaataaaagaaggtatgcatacttcacagtgtgctttaaatgtacaaaaaaagtcaaaattattactttatttgcaacagaaagtaaacataaaacctgaggggttttttttgtttttgtttttgtttgttttttagattttaccatggagaaagtggtaggtggtctataggaaatcacacctggtatttcccaacaaccatccttttgaacaacttttctttgttgccacccatgtccatgattcatatgtctaaagactacatttccattggagtaaatttctcaagacatctactattttgaatctcctgtcttactgtgcttgtgctccatctgtatgtcagaagctcctgattaatttcattacatggcccaagggtgaagcagatgtttttgttgattttatttatttgttttcatctttgtgccttctgcaatacaattcacaaaaacagaatgctgcaaatgcttgcttaccattaggaacgaagagttttcaaatagatttttactttagtatcttataacttctgaaaaatacattagtaagactttaaagatctagtaaattatatgaactatgtttcactcagcatagaaatgcagcacactttttttataatctatagatggtgaaatttaacatgcatgaggctaagaactacttcacatactcttaaaaggaaaaacaagagcagggttaaaggccagaagtgccaagctctaaagattctgtatctaacccaagtaccatcttatcaacaaaaagagaaaaaacaggactgccatttcatgggcaaaaaaaaatgttcagtcatcctgaaggaagtaactagatatatgagagttcacaagaataaaatttatacacacactctctcactctgtctctctctctctgtctctctgtctctgtctctgtctctgtctctgtctctctgtctctctctctctctctcttctctctctctctctgtgtgtgtgtgtgtgtgtgtgtgtgtgtgtgtgtgtgtgtgtgtgtgtgtgtctttctcttctctctagtaaggatgttggtttcttaagccacccaatctatagacatttattaaggcagcttaaagtggctaagatgtgggtgtttaattttttttttcagattcaagaacgagatgccaatttgttcacaaaagaatgttaaaactaatatctgagaatataagaagtttaaaataagttagctatcagaaattctcatatataaatagaaagattataaattgatataagggaagaccaaatgttggcatcaactataacacagtgagcttaccctaagatccagttctattatgacagcaagatgtccatttctgtctcataatatacagaaatttctggtctgtaacaaagatacacaaaaatattaatagcattattaaaaataataaataaaaaatattaatattattaataaaataatttaataataatatttaaaaaatagaattaattagaattaattctaattctctaatagagaattagaataaggttgtgttgatgttgttgttttccagtgcttgggatcaacccaagaccttctgaatgctaggtatttctacaattaaactatacccccagtccttacaatgaacatttttttatgttgagttactctaaaaatagcatgcactcttgatagcctgttaaatatatctattctttttcctcctgtatctaataaaaaataatagtacaacttaaatgtatgagttagctcaagatttgtggggtgatctcttactaacccaaatgatgagtcaatctgatcactatgtttatatctgccaacactgtggtcgactagtccaagtccatgtaatcatcaagttagcaccataaattttgagtcaacaaggaaagataccaggactttaagtcacaaattagtaaatgcaaatgcactaggattgactgcattgtccaagacagcaccagtagatgacacagtcagaatatcaatatgtttctctcaccataaatctatgttcttcttcctacaaaccagtaacaacaaaataaatactttagcaacagcaaaataaacccttagagaaacaacacaagactaaaagtaatgaaatcagaatgaggaatccaccaaaacagctagtgatatgtcctgaatgtatccacataaaacataaatgaagatgtggcttttcttcccaggaaggtggtaatatttatgcaatattaattatttttccaatatgtaattatgttcaaataaccaaaattttaaaggttaaagctaaaagtaattagagtactaaagaaaaccatgtaaccagtgcttcttttgtttatataattctaaatgtaaaataaagtggtgttatttagttgtaaaggtgattgaagaattagaggcttgagttgtaactcaaggttttctcccaagaccaactccaagaatgtaatttcttcctaaagaattagattaggactgctaatttggttcaagacatcatagctggggacactggcattcatagaatgacacataatattgttttattatgattctttgagaaagaccagttggcatttctggaaggttctaaaccatgtggccctcaaaagatgataaaatgcactatgttgacgtgacttcacaacagagaagtgacaagtaggtgaaaatagaaaagttatgaaatattcctggcatctcaaaaccatagccttctctcacctacttctgtggacttggaaaagtttccttgaattcatggagtcatcttttctcatgcatgaaactgtaatggtaaattactgtctcaattaccacagagctttgctagtgaggctgaattacttattgtctaccagtaatttttgcttctcttaaatctttcattggacattgaaaataatatggacagttgttcctccaggacagtgcttagaggcattcaaaatggtccagcatttgacataccaccataggctttcctacaatacagcatctaacaaaaccacactgtctcaaatccctcacaacaggactgttttccttataacaagaaagtcaggaaaacacctaaatgtacatttggtgtgagcccaggcagacagtgtggatcattctgggagagctaaagtccttatgagattgtctaacaaaagaaacatgtcatcagggcctctgtagttccaggtgtgacaagcgtatcttctgtgtgcttccacgtgtgccaagtatatctgtgacaggatcaaggcttccttattgaggagcagaaaactgttgtaaacatgttgaaggcaaatcacacagtcagaaagaggaataaatatggagctttaagtaataaaaatcaaggctttacctataaaatagaaataatatggaagatatactccccaagatccctctcatattttaagtaagtgaacatatgtatatttaaaaatgtatccaatccacaaatactgctgacatactgaacagtatgtcaaatcttatataagacactggcaatatgtaggtcaggaaagcctggtttcttcaagtccagcatgggtgagacacagatcagcagatatatgataagaaccatcagttggatggactgacgactaaaaaagagagtgacagaacagagaaacttcactcaaaaggatgatgactgatttgtaggaagtgttaagcagccagggaaatagaaaagaaaagtagcttcatgaaacaacaagtgagatatggcatcttctaaagaagccctaggaaggttagaatggagggcacgaaggaaataagcaagaacccatgatgcatcattttgtcacaatgcttagcaatggaatgatggactgttacagaataaattataagacctgtgcacaatggagagaagacatacacacaaggagagaacctttggcagctacctcggagagaacatataaaaaattttaaaaattaaataaaaaatcagataatccatattatatgtgaataaacagtttcaataattaaaatgtgtatgacttatagttacataaaaatagattcaatatcattagttatcaggaagaacatcaaaactgtgctgatattccatcttaccccagtcagaatgactattatcaagaaaaaaaaacaataaattttggcaaggatgtgaggaaagaggaaacattatacacttctggtaagaatataaattcagggagtcattatgaaaactagtatagatgttacccaggaagctaaaaatagagccacctcagcacctagctatgccaatcctatgtatattcctgaagtaatcaaagtcagcataccacaacatacttgtcaatctgctaattgcaacagctaatgcatctggtgtgcacatccatggacaactgagtaaggaaaggacctttgtaacaggtatgtgtatatgaaccaaaactatgtgatatatatgtatgaaaatataatgaaccccattgatttgtactaatttaaaaatagtatggccctctccagccatctctacgcagtggacaggttcaacggcacatccaaaaagccagaacatgtgtgacagctttcataaacctactgaggaccagaaccaatgccttagcactgagagtaagcaaaggggtaaggtcacagagaaagtaggaaaaggaatcaatgataataaatgggttgaactaaaagaaattatgggtgacatcaacacaacagaaaagccaatatgaatgattgagtttgagatggtcattgcactattaataatggctgtgattacccacacaagcacaaaacctgtacaagattaagccaggcaaaattctagagtggacaagctggtttttctcctgatctcactcatttttaagaaagcaccaccagcagctgacacctgctaaggatgagataggcattcttcttttgatgatgttcccactggtaggttttgagagcaccagtgagtgcctcacaccagtgcacatataggaaacacatattggatctagtgggttatcaaaaatatgggcaagggagaagaagttgggagggacacattgggagaaatattcaggaatcgaataaagaatgtggtgggtggatatgatcatattttttacttgcatgaaataaaaggaatttgtaatttaaaagtatcatttgtactatattttcttttcattgtcaatacacacattcaaatgaagtttgataatattttctttccatatactcagatttgttctctttggcatacagtacctttggaagggatttccattctctgtagcttggtataggaaatttctacttgaaatttgacctttcagatgtttgccactgcaccaccacatcacacccaaccacaaagttcgtccaaatccttgtcccttacattttaggaacatcaagttatcaatattaataatatcattttctgcattagttcctggaagagaagccttagatagctcatgtagcattttggttaccttttcaaactagtgccaaagcttgacaacatgcctgccatatatcatgataaattcatactgactaattaattcttgaatattggtcaatattgtaaaatagtttgtttattaaatacattgatccttgatgtatgtccagataatgctgcatcaatgcagtttttaaatccgtgacatatttcttgcttacacataatagaaggcaaccctgtcttaggtagtattcacagaatcaagggagggcttggcagagaacacacattctgacgtgagcagaaggatactagcctcatgcctctacttaactccacactgtgcatagctgctcttgccactggtgccaggtacagaactatctcatgctactactcactaactacacccaacttctctcactttgtcttcttgattttcttcactagagttgatggtggagagtataatggaaagttttctgggaaaaagtagaaagggccaagcacacctgatgaatccattacttttctggctctcacgaaaaatctgacaaaagccacttaaggaaggaagggctgattttcacttagtttctgctgatatagtctattattggaggaaggtgtggcatcaggagcaggaggcagttcatcacagtaccctcagtcaggaaacacaaaacagggattgcgtgtgccaaccttgccttctactttttattcagtctggaaccttcccgtggagtagagccatccacataaagggcaggtcttccatccttaatgaatgtagggtacaaagtccctcacaaatacacccagagacatttcaatagtgtctctgaatcctgtcaagttgaaaagacagaccagcttacaagatctgttctcttgggtacaatcatggtagaggtttgggactgggttgtactgaggtgagatggtgcattttgtgtgagccacatagtggagctgtcatcctaaacaaggaagaaaacagtattcggggtgcaatagagagttttagtgttgcagggagccctgtgtaagtacaggtagaattttgagtcattcacaatgtattaacagagttgcaaatcccctacagtgtatggctcttattacactgacataaagacattgcatgtccaactgaagcaacaagcatgttgcagggatcaaatgaaacatccaactttctatatgcctatatcagatgcttttctacttctttgataaaaaatcatgaccagagtgacttacagaaggaagggtttccactgggattagagtccatcataataggatcatcatggcatcaggcggcaggcatagcgtctggaagagcagctgagtcctagctcatgtctcaaaccataaatatcaagcagagacagaaaactccaaatggcacaaatctctaagcactcagtgaaactctctgccagcagggcagtgcctcctacgcctcccaagacaggaccaccaccacaaaacccaccacagcactccatgacaattttcaggcagctgtacttctggcagaaagtcatgtttccacgagaaacagctaaggaccaatggccagtaagatggtgatgggctgtcctaaagctctgttataccttcagtgaaatgtgttaccaaagtaagatccagggggaagccataatgcaaatccaggcacatttcagctttgtgcaaaacagagccatgtgtctcatctctttcattttacagataaagcaaacatatttaaaaattctgtcacctaaaataacatgtccatgttctgttctagctaccctgtcagtagaataatgacctgtgattgatttttttccatctctctgtttggtttgtttggactcatataccaaagatatcttcagacttgctttgtaattgaggatggccttgaactgccaatcctcctccctaaagctgagatgtagtcacacagcaccaagcctggttttcactgcacaccttttcattgctgttgtgcatctgagcagcttgcattcacttcagagccaatgtgtacctgctttctatcctaccagatagaatgatctagccagtgtcagtaatgtatgtcatcttgtcacacatatatgccttcaatattatagtctcctcaagttagttcccaagatcagagaagatacatcaattgtttaatacgtaataacactaataatagttatcaagagaagaagcagtttttcctaaatatgattgtatttatcccatttagatagaagttcatgtatatgatataagatgtccttttgacatttctatttaaatatatttttaaaattctataaaatatcctaatctgaaagggattaagaatattaagcaattattttattttattcatacctaataatctatatctccaattatttttgcctcataaaaaagctcagactcttaatcccagcactctggaggcaaaggcaggtggatctctgtgagctcgaggccagcctggtctccagagcgagtgccaggatagggtccaacgcctaacagagaaaccttgtctcgaaaaaaccaaaataaaaaataaaaaaaataaagctcagactggtcttttccaattgtctttttttagcattgttttttaatagacatgtctttacctctttataaattgtggttttagatttgtagtctgtttgaaaaggagccatcaagtcatatctgaaagctgtaagttcggccaaaaattcaattatgtaaattagcaaacaaatggcagagaaaagaacgctaactgcttctgttctctctaactcaggtaggcagcaaagccagggtgtaaatcaggagagaaaacctgtattctcatgggagcagaggcatttacattcagctttgttctaggtaaaggtcagagtgtaccacattttccatcctacatgaagctggagccattatctgcatccagaccccacgtgtgcactgaactcaggcgtctgtgtgctcaaagggccttattctcctttggcaggtatatatctacactgcagaaccaacagaacaaggcatgaagtgggcagttgatggaccctgaggggaggattacagggagaaaactcaatacagccatagctctgtcacagggttggagggttgctctgaggaagctccttttcattagaaaagattattggaagattggttttggatagaacctgctgtaactatgtttttaatactgctttgatagattctataatatcctataaatatataacaggaggtatgcccagcgatgagaggaaagtacacttggttgagagatacttctcacctcactttaggcagcatagcttttcttaaatctgtgaaatgcatcatttctccttaataaagagatgattcctctaaaactatgatttaaaaaaatcagttttagttcatgcaagtatttcatattagaattgaagaggccagaagtttaagaccaagacaccacacctgacatcagcagagggaaaactatgtctagtacttccctcccaagccacaatgctctccatggtctttcactcagctcacaaagttctaggctttttgtgttttatatccaaagaaaagattcccagcacacaactactagaaagatatttgagcccagttataaatgatttatataaaatagagatgaacataattgatagccatttaattgttagtaactcaccaaaggcagtgatatgcatgaaacctgtctgttaaaataagcaccagtgacaggcaaatttcctgagtggcactgtaatgaaagatggagaaagaatgaaatgtgtagtggggagatgcctcagtggatacaatgcttgctgtacagcattaaaaatagagaatagatcacagaacacacataaaagtaaattaggcaggtggcagagataggacccaatccccagggcaaactgtgtagccaggctacccaggataggtgaagtttggtttgagtaagagatcttgcctcagtaagaaaaaaaaaaaggaaaagtaaagaaaaatatggagagtgatcaaggaagacattcaccaccaattcaccaccaattctgggtctccacaaacacacacacacacacacacacacacacacacacacacactgaatgtgagcatgaatatgtatgtatgcatgtatgtatatatgtatgtgtgtatttgtgcacacatgccctacacacaaagacacatgtcaagaccatgaaatgatttcaaatataacaaagaagcaaaggaaaggcattgcagacaaagtagagagatggcaactacagttaaaaatactcaatacactggtgtatgtaaagatgagaaaataaactgtgctcggtaagtgagaaaaacatagcacatatgaggtactagtgtggaatcttacagaggcaaacaggaaaaatagcaaactctcagaaggcattttgtttcttgtataaaacatgtagtcttcctttcaaagaaaaaaatgtaatcaagtatttttaaaacctgtaatttctttactgtggtcataatgactccaaccatctttcacctttgtgtagtggatattcactgcaagatccagcaagtggtttctttaaacaacttatatgcttctgagcctactaatcatgcaaaaaatgtagtcaatcaggttccattttgtatccaggtttcaggtcacatttgttttatttaaaacagctatgttgaatcagcttcattgcaaactattgactgagaaaggcttaagtgtgtgccaccaaccttgaataaatcactctgcccacaatttctgatataaggctctgaacatccccacaaatctggcctacaaacagctcagcagcgcctttgcaggagagaatggtcatctgtgttataaactagcactgcacttctgtaaaagcaaaagccttaaaaacatgcctaatgctttatcagagatccaccattatttaggtaaatgatgattagcttaaaaaaataggtctgcctaatatatgaagaaaaaataagggaactccatttttatcactataacaataagttgaataaataataatctaaaaataactggggtaataagcataaaagccatgagctacaaaaatattctggcagtttagtatctagcaattgcttaacttattcacatatgcttgtcttgagaccatagtttgaaaatgcaaactattgccataattggatggctaaaaaataacaaaaattttgagatctgcatgaatactttttttgataaaacagttacaattgttgacaatctggtgacacctcaggcttctataggagtaacatggtggtgacactgtcaaaatggaaactctcctgaaatggaggtggacctaaggcagaagactaacaggaaaataatttagatgaagccaagagaaagaatggcatctagggacagtgataaacttgatgtatgtctcaaagacagagaaaagaggagactatgtagtatcacacctctctgttattgatctgcttgctgggctatttaatgtgcctggtaataagaaattatttccccagcttcagacttaaaacgtgatagtaaaaattaatagagtaaaggctattttttgtccttacttcgtgcatttttatgatgctaacatttgtcatgggaatagtaagaagatacacacattgaagagccctcttgttggctctgatgattagtggtttgaacatcagcaaaggtgttcaccctgaaagccaccacgtcactcttgaggattctcagcaccttcagctccccaaatttatgacatgggcaaggtctatggagccagagggaagaccttaggctaattactcaaccttagtaagcttattgtaatatgggaatgacaaggcataactcatagttattgggaggcttataataatgaatgtcccagagaaggtgcatgtctgtcacaaaatagttgtcatcactgtttctcaaacaaacagaatgtaaagaatacatatgtactaattagaattcctaattctggctatatttccatatatatatcacccatggagctatattatagtagagatgctaaactctgtcccccaaaagatatttatttagtaggcacagtagagtcctgtctatgttgcaaagagtctgtgcttgatccttacatccagctagggctataaaagcattttttatcatcaaagaacaaaaaaaaaacttaaaaatgaaaagggctttgaagaatgccaaaaagtctgcctttctaccactgctaccactgccctacaccacacacacacacacacacacacacacacacacacacacacacataaatcaaggacctgtaggtaccttgtaagtagagtgggagcaacacaagctcagggatgtgaattcaattccaagaacccacataaaaagacaggctgggtggtttgtgcttgccattccagcactgaggaggcagagacaacagaatagctggatcttgttggccaggcagcctctcccagtccttgagagaccctgtctcaaaaagtaatgtggagatagactaaagaagataccaaaattgactttggcctctgcttacacaaatacatttgcatatggtcacacacacacacacacacacacacacacacacacacacacacacactgtatctacagagagatgctgactataaatctataattgatatgttgatacagaacttcaggaaacaaaggagacatctttacacggatcatttcagagaagcactagccagctaggcaggttcatctctgtcactcagagctaagcaagctctgtttagactctaatccaaaatgtaaaaccaagggcctgaacttggaccatctggcccatgcttctgccttggattcaagaactgtaaaatctgatgggtgcaaattattcatgtactcccaacatgcactgagtccatcctccagtgtagccctccagttatgttccagaacagcagctggagcctcatcaagctcataaccagcatcctagtaaagagaagtcaaaattgaaagcaaaacaacatgagtgaatatttagctcaacaatcccatgcctctcagagtatacaacagtgaaattgcaaaaaataaataaataaatagagtgatggtgaattgtgcacaaggcatctcagagcaatggagatcaaggccatgattcaaacctgaaaagagagattcaaagaaatccaaaataaagacctgaaaaaaagagaggttagaacagattagggtgacatttctgggtagtatttgtttgttcgattgtttttcctcttattcttctgtgtatttccaagtaaaataaaggaaacaattcaattcattaattattatcctctctggataatgttataagcaatgtttgattaaaccactatcataaacatgtcaaaacaaacctgtcagagactcatgagtgttctccatccagtcattaataataagaaatcaacagccattgactgtataacactgactattgccaaatgcagttctgttaactgtgtattaactcctttaattttaacaattatcatagaaagaaagcaattttgtgctcctgggtaatgtcccacccagtttcctaaaaaaggatggacttattcctacaacactgagagtaatgctaaaatagatcccagtttccacaatgatggatcaggtagtgctgattcaagaggacttgatactcttgaaacaagctgggaaaactgcaagcttatcgacctagtaaccatctccaggtcactccctggagtggtttgaggactcccttctccctctcccttccctcccccagccaactactagcccccccatctcatgcccctctgctccccaggggggtaaggccctccatgagggatccccagagtctgttatatcatcctgggcagggcctaggccctcccccatttgtccaggctgagagaattttaagcaagaaatcaaaactctgagataccatcttacaccagtagaggctaagctaaatgcccttcccctatcatgagactgatgactgccttatatgccatcctcgactcctcatccagtggctgatggaagcagaggcagacatccacagctatatgctgaactgaactctgggacccagttgcagagagggaggagtaaagagcaaagaggttgggaccaggctggtgaaacccacagaaacagctgacctgaacaagggggaacacatggaccccagactgatgtctgggaggccagtataggactgatccagacccctgaacatgaatgtcaattaggaggcctcgggtgctctttggagcccctcgtagtagatcagtatttatccctggagtaagaagggactttgggaacccatcccacattaaaggatgctctctcagcctgaacacatgggggagggcctaggctctgcccaggatgatataacagactctggggatccctcatggagggccttaccctccctggggagcagagggggcatgagatggggggctagtagttggctgggggagggaaaggagagggagaagggattgacatgtgaagcagccttgtttctaatttgaactaataaaaaagaatatcttaggaaaaaaataattttaagcaagttcaaccttcccagtacctactttttctgttacctttctcatcccacgagtgcatcatatggtgtaggaaatatcctacactcttgcctcttggtctgatgttcatgcagtccaatcttgacaggcacagccaagacgctagtcatcttggcagctctcagaattgggtgtcagacactaatacaacaatgacatacaccagtgatgctaggacatataccactcagtagattttgttcctccccatccctaccccagatgagcaagccactgtaagcatgtgctcccatctcctgccacatctgattctgatggactcacatacaagtctcttaagaccagcctggaattaatttgcctgtaaacttgatggatgtagactgttctgatcataaggtgactaaagcaaacctctggatgcatgtgtaggtcacatgaagggtaaagacctgccttgaaatgtgtgctgacaccacctcataggttgttcactctgacaggaaaaggaaaaccaaactccacagagggtctgcattgcttgttctctgctttctgatccacaatgacaagaactgctctacagtgctcagacatactcatcctcaccctgatgggcttagactgaaaaaactacatatcaaaacaacgttccctcccttagactgtgacttcctttgatcacacaagtggaaaacaagtaatagagaaaatctgggtcataggtgcactgaaacctgaccctgtggttcccagaccattagaactgtctggtggtaggaataagatgttggagataaagtctacataatccaaatgatgctttacatgtagtttaatgggtctctgtttgggtcttaaatgatgggaatgaaggctggcaatgtggttttatgggtaaagccaggactgcctacctaagttcagtctcaagaagttccatactatggaaagaaaaaatccattcccaaagttgtcctctggcattcacatgctacacacacacacacacacacacacacacacacacacagagannnnnnnnnnnnnnnnnnnnnnnnnnnnnnnnnnnnnnnnnnnnnnnnnnnnnnnnnaagagagagaggtggtaggaagaaggagaaagatgcaataaaagtaaactacaagaaaacatgcaataaaagtaaactaacaggaaagaaacagagtttctattttaaatgttctatcccaccatattcatttcaggttgaagatatggggattatatccactgaagacattagtgctattaagcagaagtcaaaaactttgcactggaatggtagctagatccaacctactgcaggttctaagatctaaaatcaaactcatttgaaagactgtttcttagtaaatgagcactgctaagttgccttgcgtacacaatggcacgtaagaaagtgggttctaggatttagctgcccagctcatggaggatgctgcagccatgatgcatggacactttgctactgtttcagcttataataaattttataaaccttatcctgctgcttttgcatgattgcagaatgggacaattgctgggacgtgtgggcttccagctagagtttaaggatgacctgagaggccaggcaatgtgggacagggttgcactcccagtaaagattcccagaaatagaaatggaatgtagactccagaattgtggagatgctaggaatacagaatgcctgccatagacaagagaagtcttctgagtaaagaggtcatgagggcttcaaatagaaagccataggaagagctgtgaagccctcagcactcatatcatgacaaaaacattctggacacataattctcaaaagatgtctgctttttctttatgttcacttaaaaacatgtgtgtgtgtgtgtgtgtgtgtgtgtacgcgcgcacacaaatatatacagtttaaatgtagttatgccacttggggtgacaatgcttccctatgagcggtagattatttaacagtgaaaccccaatgccaagcatgggaaacctgcctttgaaattggcaagaaggggagtgtataagagacccccaaacaatgcagactactgctgttgcccttagtttcctcccagaactcaaaggttaaagcctgtttctggttacaactgactggaagccttctccctgaggactagagttccaagagaaaaaagcaatccacagtcctacccatctgccaagcctctgaaccacaaaaatgactatcatgacacaatatcccaaaggggacaaaaatagcaattacacgttggaataaacaaagctacctcattggatgtaaggcccacacaaaagaagggaaattatgcctggtcctgtaaacttagccaattacccttagggtccaaggtcatagaccctagggagagtctgccacttcctcttaccaaaaccagtatgatttctaagttcattctaaatatttacctctgtacccacagatacctgtaccagtcacctctcacaaaagaagattcgttttgcagatgatgaagaccaatacagaaagccataactggtcaaaatgtacagaacaactgtggggtgcctatctccaaagcacttagatcacaattcctgcacctaagactcaggaaacattgcggaagaggccacagaaagattataaaagccaaggatcaggatgggatgtctgctgtgagatagtgtcttcagggaagctacattcatgagtagtaggctttcttggactgccagacttcaaatcatgacacagagacatcttaattatttttgcttggccttcacttaggcttgatttctagttaggtttgtttttaattaaattaacctgtttctattaatctatgttctacctcaaggcttgtttacatcatatacatactatctatcctgatttcctacttcctccatgtctgggtggctgttcacttgctggctggccctagccaactgtcccctggctggctcttcttatctctctgctgccagccctgcctatcccttatctacctaaatgttggcatttcagcatttaattagaccaatcaggtaccttaggcagacaaggtgaaacagcaacacatctttaaacagttaaacaaatattctattccttggcacccatgaagttccagcaatttgactccctaaacaagatcatcacaatgatgacgcggttgacatgccaaactggatgaggaaatctcataagttcccacccctgaatgaggaagtataggcaattagtggacacttagagagggagaattggtcttctccagaaacaaggccctgatatgctacacataccaaagaccatccttaaacacatgaacacacaggcaacactaaaaggattcattatgttgtatttatatgtctgtatgtgtatacacaagtgtgtgcacatatgtgagtgtgtgtgtgaataatgactaaagaggaggtcaaggcaggctatggcggcagaagcctttaaccccatcactcaggaagcagaggcagacagatctctgagtttgaggccatcttgctctacagagcaagttccagagcagccagggcaaaaggtcatgaatttgaggagtggaagagacaaacataggaggaattggaggcagaacactataaatacaatccacataactgaacttctgaaaagaattaataaagatgtcagtaaagtcaccttcactgattttgctacaatgtttaaaagttgaaatgtttagttgttattttaactgtgtaaagtcttcatgtcaaggtttcaagttccccctgttgttgcttcaattttgcctccctgctttgctttgggatttgttgacttcattctttatctggagtctctaactgttagtgacatgttctccttcccttaagtgataaaggatgctggaatttaactgtgataaattccctttccctgaacagtgggcctttgtcagagagaaggcgctgggtgtctttcataaaccttattatttccttctgaaactcacaagctttttctgtcgtcaaccttgaatcttgtatggctccatagagacataaagctctttccagcaaggtgttatttgttataaataaggacaattaatttaaaatttaaaaattgctaaaagaacagtaagcttccaatcaaagatcaaatttacatttcaggtgttagatagatacttgtctaaagagaatcatgacctggaggtggcagagtcagagaaaattttaaaataaattagaatggcaaggtgttctaacactttagtgttctatgcatatcactttgaagctcaaaacaataaatattaagaaaataacacagttaaaatgggatgatgaatttaaagaatttctcaaaaatacatagttaataaacatataaaactgtttaacatcctttattataagagaaattcagattaagcttcttttggatttcagctcacccaagtcagattggctatcatcaagaatgcaaatgtaggactggaaagacatctcagcatgtgagaaatcttgtgctgttccaaaagactaaagttccttttccagtgcctatattgggtggctcacattggcctgtgatactatttctattatcctccttgggcacctgcacttacttgtatataccctcacacagatacatatatgtaaacataaataattcttgtagcttttggacacagcaaggcagctgtacatatgaactcacagcagttgtgacactgtacacaagatctgtgcaagctgaacacagaagatcccatgccagagaaaggaggcaaacacaaagcctcacccctagccattggcaatccttaggtactgggaaagggaaagtcagttttacttaacagtgtttcttctggtaacagtgtatccacagtgctccaatggaaggtcacacatctgtgtggaaagcacaagttggacttgatgattaaaaaggggtggggggcacagatacatggtagggaaaatggttgtagtgctatgaattagaatggccctcacaggcttgtgtatttgaatgcttggtcaacagaactttttggaaagggttaggagatgtggccttgttgaaagagggggccttttggggtctaataagcccttgcactcccagttagctctcactgcttcctgtttgtgggttagatgtaagctctccagcaccgctccagtactgtgcccacctgcctgtgacgatgttcccagtcctgataatcatgaactctaacctcctggaaccatgagtcccccatagtaaatgttttcttttataagtttttgtctttgtaatggtattttgccatggcaatagaaaaggaactaagacaggggtacatatttgggaaaattggggaagagatggatacaataaaaattcattgtacaaaattctcaaagaagtaatcatttcttttaatcttattttaaaatagagttaaaatgaaaacagcatgcatataggagtgtggatcagtgaagccactaggaagcagtgatggagcaggaactctactatatgacagagctgcaatgctcatgagcatgttcccagagctacaacgctcctaagcatgttttcaaagctacgaacgaaactcctgaacatgtgcccagggctacattcctgagcatgagcccataactataactccctgagcatgctcccagaggactttatttcttactacaaagatgcctcacagccatgctttgacacttcattcacaatagcttgggaatggaatcagcctcagtgttcagccactgatgaactgataattaaaaggtggtacttatacaaaatcagaatttatttggccataaagaaaaatgaaattatgagatgtatgggtaaatggaaggaagtgggggcaattctattgaataacgttcactggaagtgcattagggagggggaataacagaacatagattaaaatgaaagtagaggaagataatgctgtgggtgagattaagtaaggagaagagtccagagatggccaagaggaggggttgggagaaggttaacctaaagaaaatgtgtgtggataagctatatggaaactattatcatgtaacacagttaaaacataattttcttcaaagggggttagagggaagctgttctctttgactgcaccatgctgctcctaaaagctgtgcattattgaaaaaaacaaatctcagtgccatatgttaaacaccttcacatcagttgttggccataaaagtcacagggacctccagaataagcaggctttttgcagtaggagactgcattactaaagaaatcaagctagaactgtgctggaagcctcctccctgctttccagctttcatggggctggaaagtactatgtatgcccctgggtagaaaaagacatcagcagtcttagccagctgtgaaccccatgcatttttgccagccagggtgctcccatttgtccaacagtggcatgactgttaaggggacaactcctgttctctggctggttttgagtggaccatacaagagaggaatgatgtctggaactgtaagactgaccaaaaacacgtggctggggaattaatgagccctaggtagaacactgctgttactcagttgaattaacacaacaccaaactgcattctaaatatacattatccacattggcaaatgcaactctaagcattaaccaaatatgcctgttcattaacagtgaacagctacaaaagctcaagtgctgacggacaataactaatggttgaatgctcaaaccagaagtgatcgtggtggtttgaatatgatgacccctgtagtctccagcaaccagttggtggcactatttgggcagttcaaaaggagtggccatgctggagaaattgtgtcactagatcaagcattggaagttcaaagatgagccattcccagttttcatttggcttcctgattttggtttaagatgtgagctcatgtctgctgccccaccatgcttccctgccatgacggtggactctaatctctctggaacagtaagcgaattaagttcttttctgtgaattgtcttggtcatgatattttataacagcaacagaaaactagccgatagagaacacatgatggaaggaggatcataaagaatataagcacagaaggataaagaggagagacacaaaatcaccatctctgtgcacttcacagcccttgcaaacatgaacttaaggctgctgctgttattcacacagggccttcacaagactggtctcttcaataaacaagtacaggaaccctcccccactgaaccatgaatactgatagattcttggaaatggggaatcattgtctttggatgtttactcactgatgagcccaccaagctataagtggactgttccaaacccatagtcacacagatggttctggttaaattcattgagtcaaaaataatacaaaaaaagcatgattatgggacaggtatttacaaagagaattcaaattgaaaaaggaaaaatgaagatcagaaagtttgggagtgagaataattataacctattatatacatgaattagtttttgaaagaacaaatttagttaagataaaataaatttaaaagtacagtgaaaagggagataaatattaagtagcaacctaaggtatatgcaattatgcatcactgctattctatcagtttatacttattatttaatataagcagggccgatataatataaaataatcaatttccaatctttttaatccttagggatcacatcttatttataataaaatatcaccatctagtggcattaatttcaaactgcaggcaaaagatactataggattttatgtttaacaaaagtgtcacatattcaaacacaaaacctattttaaaataaaccaactacttcagtaagaatgaattataatgttagaaggccaataaataagaatctatttcagataacgatattcaaaaagctagttcatgagtgaggcctatgtgctgtttgtgaatccttgtgctaaataaataaataaagcttaacagacagcacatgctctgaagtgtatggtgtgtaatgaagtttctgaacattgtgatataagagcctctttttcttgtgggccttgttggtctatagaaggtttaatactttgagaaatactgctttagggtgtacctgccatagggcaattaacaggtatcttagactatattcatcacaaagtgaagggaaacgatttattctgcataatttcatgctactctgctgatacagcaatggatagatgctctcaatcacacatcctcacataattcacagatgggttaaatgggggatataaaacaaatcagcaaaaacaaatgagagacagcaaaggtgttgagcatgagaaagcagaaaatctgaaccatctgagatgtcttaaagaaaattatgatttaagtttgggtcatattcaatgtgaacaagtggacaattagacacatgattctaaaatttggggacaaggtctaagagaagtatacacctaggtacaccgacactaattaacagtatttaatgttttaacactgaggttaataagtaaataaacttttatacaccagagaaaggatataaagatgggatctcaagacacatggcaattcacaattctagaattgtgatagaaaaaaaaatgctatcggactgagtctaacttgtagcctgcttttgtgtataatggtttttaaagacacgtttatttgtatttcatgtgtatcagtaccgtggtgtgtgtgtgtgtgtgtgtgtgtgtgtgtgtgtgtgtgtgtgtgcgcgtgcgcgcgccgtatcaggtttatagagatcaaagaacaacttacagaagtgggttcttttcttctgccctgtggcttctgggaactgaactcaggcttagtaggcttagcagcaagcatctgctaaactactgagccacctcccttgtaacacctggtgtcttcacaggctaaaagaaagcatggaatcatctggaactaaagttacagattgttgtcagctgtcatgtgctgggaactgaaccaagatcatctgttgagtatccctgaaggcttgatgtttttaaacaaatctaagtgctgaatgaagcacagtagtgaccagaggtggggatgttgacccataagctactttgttatatggccattttatagaaagcattgttgaccggttgtctagatgatagacgtgacccatgaacaccacatctcaagatcaagtgaggccaggtctcataagggagggaaaactgtcaaactctgggcatgaggatagatgaaaaaaggtgtataattggagtttaccataggcttagcaagataaaggacatcacaatcttgggagtcatgatcagtaagttattgaatcaaatttattgaaccaaagtttttgaaagtttgactgggatatgaggaggtagaagcaataataggtaggactttttcagagtttttccattttggtgatgaatagttgagatgcagcttcatttgggtgtgtgaaaatggggtatagcgatgagtatgtgccttgaatgagatcagggtggtcctccacaaaaactcaaagatagagactctggggaaagatgccactgggaggcagcatgctgtgtcaggagacagaacattttatgttctgaaggcatccatgttctcagcaagtaagagggtcaacagataagaaagtggatgtgagaatacatggtggaaattttaagatagcgtatacagaaatatttgttccttacagtggaaaagagaaggatttaaaaatacagcatttttgccctccatccataagggttaatttaacataatttgagagaaactgcaagtaaaacatagctcatcaaacatatggaaaaactgggtgggtgtaatgataagtctttctgacagccacccgcttccgccgcaacattaggacaccctgccacaaaataagacacaaagacttatattaggtacaatgctgctggccaatgactaggatttcttatcatctacctcagtcttaattatcaaccataattattaatctatgtatttataaagacttatcaaggacgccagcagtatgcaccctctcttgccagtgatcacatggcaactgtatctttactacatttcccagaatcctcctcaactcctagccccatctatctttctttcctatttgccaacagtgctttatttatcaaccaataggacaaacctatacacagaaggacttctcccatcagctgggcacatatggtgacatatttttatgatctaataaagccactgaagatcagagtgcaaagttagccacagccatagaagctgagcagtaaagtgatggcacacacctttaattccaggactcaggagacagaggaaggtggatctctgtgagttcaaagccatcaagggctacatgggagtgaatcagtctataggaactcacacttttaatcccagcactagagaggtaagataggagtggggtgttcagtagtaagtcttaggcattcaatctcagtcattcagtttccaaccacactgagaattcatggagccacagtagtcccagcctaggtagaggtaagagctagtgactggctgctttgcttctcttcagcttgaacccgaatatctgtctctgggtttttaattatttgtgctacaaattggtgcccaacatgactcacaaacccatgaccctgagattaagagtcttaggctctcccagctgatataaggagggatatagcagcaaggagaatagagaatgtatttttaaagcataagactggaaggtgcatcacagagagaaatttaagagggaatatctctgttctttactggaattgcctgtgtggtttatgcagtaaatgcattcatattacagctcacatcaatgcctctgaattagtggaatggaaagaaatgtttttcttcttctgttttcacagtaagagcattaggaatcataattaaaaatagtagttgtgagaaaggtaagtttcaccaccaacacattatttaggttaagcacctggtggcaaagttcgagtgtacaaattcaagagaataaatggtcctatgaatataaggtgaaaggggccacagatatacagtagatgagaattaagtcttatatctcataaaagatgtcattacactaggcatcaatctatgaattcccacgccaaaaccaaagtcaatcagctattttgttgagtgctctctaggggtgactccctgaaggaaaaagagacagagagatgagtcatgtattctctcacacaatgcatagacacaatgcattgaggacacaggctttcaactggtaccacactacatgcagcaggaactctgagctcttaaagttggctaagtagagtaagagtcataaggaaaagctaatggtgctcatttctttcttttaagatattaaaaactagtcactgaatattattttaagcaagggagaatagtctgagtatctttgtctgcttgctctttgaaagaacaagggaagaaatgaatttgaacttcagtgtgcacagtgtcatacagtgaaagaaagccagagcagaggagtactgttgggaccagagcttcctctctgctttctctctacttcagcttgtaacaggctcccccatgattggcgatggaaatttctgagagggacttatgtgtcaccagcaagacagaaagcagttcctatcatagccaagttcactgactgtctgtgaagcagtggcagcagctgccacccatcgggagctttgttgtgcccaactgcatctccctccctgctaggcagtggcgagcttctcttgccagcaaacctcctccccacagtcggttcccagccacaggcaccgttatattgctttactctctgtttccacatgaatttggaactttccagcttcctgtttcctgtgtcatgctgggtcctcacacatactcttagatacaaaaaacactctagaagatcgtgacggaacaaactgtgaagggaagcgctttagtacagcccttgctgtgtgtaaaattctttcctgcctcagagatgtgagacatgctttcacattttaaacctttcctatgattaatgaaatcaacttttgaaaaagagtcagaaatttttcttggaatagagggaaactttgatacaaattttatgaagtcaaagatgtttcctagactctcattagtttgaagttagtgaaattatatttaacaactaactatgcactttcattctctcccttttttggattattttgaaaggaaaaaaggatgagcaaattcttcatctaagatttacatctctctacttgtgacagacacaaagtgggaagctgtggaacataatgaggtcttcatatattgacttcattgccaaaggttgaaggaaatgccaaagcaacagctcatattaaatctaacaaccagataattctaggaaggaatatttacctgttataacacccaaataatccctgggctttcacctccctctattcttgcagttatgcttcctaatcccccttgtcctttcataggaaatacattcagattgagcatgcaaaattattgaatccatgttattgtttgtctaactccatcctatcgctttcctgtgtgtcgactggctttaatcttaaaataactatttaataaagaactgcatgccctaagaaccatattattatttaaacaaaaaaagccatcagaaacattgagtaatgctgctgtgaacatcgttgaagatgtccttgttgtatgaatgtacttcttttgggtagatgcctaagagtggaattgctggatcttgtggtaaactgattcccatttttttttttgaggagtcgccatactgatatccaaagaggctatacaagttggcactcccactagtggtggagaagtattcccctttctccacatcctctccaacatgaactgtcatagtagtttttttgattttggtcattctgacaggggtaagatggtatctcggagttgttttgatttgcatttccctgatggctaaggatgttgaacaatttctcatgtgtctttcagcagctgttttagattcctctattgagaattgtctatttagttctgtaccacactttttaattgaattgtttggtgttttgaagaccagcttcttgagttctttgtatattttggagatcagacctctgtctgatgtcgggttggtgaatatctttacccatctgtcagctgtcgttttgtcttgctgactgtctcctttgccttacagaagcttctcagtttcaggaggtcccatttatcaattgttgacctcagtgtctgtgctactggtgcaatgttcagtactggtggtctcctgtactaattaattcaaggttattcccactttgtcttctaataggttcactgtagctggatttatgttgagatctttgatccattttgacttaagttttgtgcaaggagataggcttgggtctaactgcagtcttctacatgtctgcaaccagttatgccagcaccatttgttgaagatgttctctttgttccatcatataaatttggattgtttatcaaaaatcaggtcatcataggtgtgtgggttaatatgagggttttaaacactataccattggtctacctgtctatttttgtgctgataccaagctgttttcaggactatagctctgtcaaacaagagctaacaccagtactcctcaaagagtttggcacaatagaagctgaagggacattgccaaactctttttaaaatgctaaaatcactttgatacccaggccacacaaagatacaactaaaaagaactacaggccaatatcaggtctgtgaagaattgtgttgggattttaatggggattacattgaatctttagattgcttttggcaagattgccatttttactatgttgaacttacctgtccaagagcatggaagatctttccattttctcatatcgtcttgaatttctttctttagagactcaaaattcttatggtacaggtccatgcccctcaaccgaagaatggatagagaaaatgtgnnnnnnnnnnnnnnnnnnnnnnnnnnnnnnnnnnnnnnnnnnnnnnnnnnnnnnnnnnnnnnnnnnnnnnnnnnnnnnnnnnnnnnnnnnnnnnnnnnnnnnnnnnnnnnnnnnnnnnnnnnnnnnnnnnnnnnnnnnnnnnnnnnnnnnnnnnnnnnnnnnnnnnnnnnnnnnnnnnnnnnnnnnnnnnnnnnnnnnnnnnnnnnnnnnnnnnnnnnnnnnnnnnnnnnnnnnnnnnnnnnnnnnnnnnnnnnnnnnnnnnnnnnnnnnngaaggggagagggtcaagatctgctgagcaaattgggagcatgggaagaagggagagctaggagaatgataagaggagaagaagagggatgaagaggacatgagggagcagaaagtctgagtcaggggaagaatagatgataacaagaatggagatataatagagggagacattttaggtttacagagaaatcaggcactagggaaatgtctggagatctacaaaggtgacaccagctaacaatctaagcaacacaggagaggctaccttaaatgccctcccctgattatgaggttgatgactggcttatatgccatcctatagccttcatccagcagctggtggaagtagaagcagacacccacaagtaatcaccgaactgaactggaagatgcagagaaggaccagtgaagagcacaggggtccagaccaggctggtgaaacccacagaaacagctgacctgaacatcagggaactcttgctccccagactgatagctggaataccagcatgggactgatccacatcccaggaacatgggtttctgtggggaaacatcagaaatgtatgggacctcctgtagaatttcagtacttatccctagcatagttgtggactttgggagcccattccatatagagtaatactctctcagccaagacacacggctgtgagcctaggccatatcccaaaggatacaatagacactgatgacgccctatggaaagccttaccatccaggaggagcagaaaggatatgtgatagatagggttttagttggggtggcagtaggggaggacaggtgggagtagggaactgggattgtcatgtaaaacaatcctgtttttaattcaaatgaaaatattcaaaagctatgcatacattatccctgagacattatattattaatattctttttatttttatagaaaacttgctttttcatctatgtgttatagttaaggttctattgtcttatcaaaattcttttgatccaagggccattatttattcttttcccaaagtcataaattattaaaagtctttgggtctaagaaaaatattttgaccctctggttagagattgtttagtaaaaatcagaaaagattttattttttattattctcatggcctgtatagcattggatataccctatgaatcttgttagcctcagaatttccttaaatcttttaaatttcactaacttcctgaattttatgagactttctctttcctctgggagagaaggtttcagtccctcatatgaaatccctgaacacagctacaaagacaaaattttataaagccattaaaggatctagaagcatgggactttgtgcagaatctgggtagagcaagctaatctctcctccttaacacagtaaagccaagtgagcacaatattctgcaagaggaaagcagttttaccagggagattaaaaattagaacccagttgacccagagaatattgcacacttctattaaaagtttaaggacatctgatcccctataccatttttcaatgtgaagggatagttttaaggtcaaatgtttcatataattattgaataagtcgctgtgtatatacaaaaatcaactaatttaaaaggatcaaattaatacagagactcctcttcaatgaagaatggatcctgtatcttgactgctacaatggcatgtgaaaacccctttccatagcaataaacagcaagctttgactattacaaagcccttgtttttcactgttttctgtaaatattttaaatgtaggcaaaattacaaaccatatctagatccattttttctgtgttagcataagactgaatacaaaatatgagttctgaacctcacctccatccctaaaatagactaacttctagagtctgccttccatttccactccctggggaatccacagaccttggcaggtcttagccttcttcactcaccatacctttgtatcaactgtgaatatacagaggtactctcttcatagaaacccacagttcatgctggcctgggaattggggaaatgatnnnnnnnnnnnnnnnnnnnnnnnnnnnttcctgaccacaattgcaaatagcctggtctcagtaccgaaacaggggaaggacccagaaacatagaaggaaaatttcctaacttaagtaaggtggtacccatagaggtacaagaagcacacagaacaccagatagagcaaaccaaaaaataaagttcccttagcacataataatcgaaaacactaaacataaataacaaagaaataacattaaaatttgcaaaggaaaatgaacaaataatataaaaacagacccttagaataacacttgacttctcaatggagactctaaaagcctgaaggtttagatgaatattctgccaactctaaaagaccacagatgccagcttagtctactatattcaacaaaacatttaatcacatctgatatatagagaaaaacattccacaataaaacaaaatttaagcagcatctagttaacaatctctacagagtcactagaaggaaaacttcaacctaaagcggttaaagtttagtcacacccaagaaaatataagaaataaataattccagacaagaaaatcaaaagaggggctaaaaaggaacaaaaataacaacataataacataatcaacaaataatgcttattgacaactctcaacatcaatggtgtcatttcacccataaaagatagaaactaacagattgaattataaaacaggacccatccttcttcagcatccaagaaacacttcttagcatcaaggatagacatcacctcagaggagaaaaaatggaaaaagatattccaagcaaatgaacctaagaagcaagctggtgtaacaaatttaatatctgacagaatagtcttcaaaccaaaactaatctgaagagatagggaaggacattgcattctcatcaaaggaaacctcaaccaagaagacattgacttttttttcttctgaggaagcgagtgaaacagggtttctctgtgtagctttggatcctgtcctggaactcactctgtagaccaggttggcctggaactcatagagatctgcctgcctttgcctcctgagtgctggaattaaagactaaaggagtgcaccagcaatgcccagtgacattgtaattcttaacatctattctccaaccacaagagcatccatatttgtaaaagaaactttacaacttaaatcatatattgaccaccacacactaatagtgggatcttctataccacatgcttactaataggttatccagacaaaaactaaatgaagtcatgaataaaacagacctagcagatatttaaagaatatttcacctaaacacaaaagaatatacatttttctcagtacttcatgtaatatacgtggaactctctccaaaatttattatatacttggacaaaaagtaagcctcaacagatacaagaaaattgaaatagctccctgcatcctatctgatcaccatggattaaaactggatagaaacagcagaaagtttataaacccatataaattgaaaaactcactaatgaatgaaaaatggataaagacaaaaatcaagaaagaaaataaaatcatttataattaaatgaaaatgaaagcaaaacatactcaaacctctgggccacactgaaggaagttctaagagttaagttcatgacacaaatcaccaactcttagaaagagaaagcaagaaagcaagcaagcaagcaagcaagaaagaaagaaagaaagaaagaaagaaagaaagaaagaaagaaagaaagaaagaaagannnnnnnnnnnnnnnnnnnnnnnnnnnnnnnnnnnnnnnnnnnnnnnnnnnnnnnnnnnnnnnnnnnnnnnnnnnnnnnnnnnnnnnnnnnnnnnnnnnnnnnnnnnnnnnnnnnnnnnnnnnnnnnnnnnnnnnnnnnnnnnnnnnnnnnnnnnnnnnnnnnnnnnnnnnnnnnnnnnnnnnnnnnnnnnnnnnnnnnnnnnnnnnnnnnnnnnnnnnnnnnnnnnnnnnnnnnnnnnnnnnnnnnnnnnnnnnnnnnnnnnnnnnnnnnnnnnnnnnnnnnnnnnnnnnnnnnnnnnnnnnnnnnnnnnnnnnnnnnnnnnnnnnnnnnnnnnnnnnnnnnnnnnnnnnnnnnnnnnnnnnnnnnnnnnnnnnnnnnnnnnnnnnnnnnnnnnnnnnnnnnnnnnnnnnnnnnnnnnnnnnnnnnnnnnnnnnnnnnnnnnnnnnnnnnnnnnnnnnnnnnnnnnnnnnnnnnnnnnnnnnnnnnnnnnnnnnnnnnnnnnnnnnnnnnnnnnnnnnnnnnnnnnnnnnnnnnnnnnnnnnnnnnnnnnnnnnnnnnnnnnnnnnnnnnnnnnnnnnnnnnnnnnnnnnnnnnnnnnnnnnnnnnnnnnnnnnnnnnnnnnnnnnnnnnnnnnnnnnnnnnnnnnnnnnnnnnnnnnnnnnnnnnnnnnnnnnnnnnnnnnnnnnnnnnnnnnnnnnnnnnnnnnnnnnnnnnnnnnnnnnnnnnnnnnnnnnnnnnnnnnnnnnnnnnnnnnnnnnnnnnnnnnnnnnnnnnnnnnnnnnnnnnnnnnnnnnnnnnnnnnnnnnnnnnnnnnnnnnnnnnnnnnnnnnnnnnnnnnnnnnnnnnnnnnnnnnnnnnnnnnnnnnnnnnnnnnnnnnnnnnnnnnnnnnnnnnnnnnnnnnnnnnnnnnnnnnnnnnnnnnnnnnnnnnnnnnnnnnnnnnnnnnnnnnnnnnnnnnnnnnnnnnnnnnnnnnnnnnnnnnnnnnnnnnnnnnnnnnnnnnnnnnnnnnnnnnnnnnnnnnnnnnnnnnnnnnnnnnnnnnnnnnnnnnnnnnnnnnnnnnnnnnnnnnnnnnnnnnnnnnnnnnnnnnnnnnnnnnnnnnnnnnnnnnnnnnnnnnnnnnnnnnnnnnnnnnnnnnnnnnnnnnnnnnnnnnnnnnnnnnnnnnnnnnnnnnnnnnnnnnnnnnnnnnnnnnnnnnnnnnnnnnnnnnnnnnnnnnnnnnnnnnnnnnnnnnnnnnnnnnnnnnnnnnnnnnnnnnnnnnnnnnnnnnnnnnnnnnnnnnnnnnnnnnnnnnnnnnnnnnnnnnnnnnnnnnnnnnnnnnnnnnnnnnnnnnnnnnnnnnnnnnnnnnnnnnnnnnnnnnnnnnnnnnnnnnnnnnnnnnnnnnnnnnnnnnnnnnnnnnnnnnnnnnnnnnnnnnnnnnnnnnnnnnnnnnnnnnnnnnnnnnnnnnnnnnnnnnnnnnnnnnnnnnnnnnnnnnnnnnnnnnnnnnnnnnnnnnnnnnnnnnnnnnnnnnnnnnnnnnnnnnnnnnnnnnnnnnnnnnnnnnnnnnnnnnnnnnnnnnnnnnnnnnnnnnnnnnnnnnnnnnnnnnnnnnnnnnnnnnnnnnnnnnnnnnnnnnnnnnnnnnnnnnnnnnnnnnnnnnnnnnnnnnnnnnnnnnnnnnnnnnnnnnnnnnnnnnnnnnnnnnnnnnnnnnnnnnnnnnnnnnnnnnnnnnnnnnnnnnnnnnnnnnnnnnnnnnnnnnnnnnnnnnnnnnnnnnnnnnnnnnnnnnnnnnnnnnnnnnnnnnnnnnnnnnnnnnnnnnnnnnnnnnnnnnnnnnnnnnnnnnnnnnnnnnnnnnnnnnnnnnnnnnnnnnnnnnnnnnnnnnnnnnnnnnnnnnnnnnnnnnnnnnnnnnnnnnnnnnnnnnnnnnnnnnnnnnnnnnnnnnnnnnnnnnnnnnnnnnnnnnnnnnnnnnnnnnnnnnnnnnnnnnnnnnnnnnnnnnnnnnnnnnnnnnnnnnnnnnnnnnnnnnnnnnnnnnnnnnnnnnnnnnnnnnnnnnnnnnnnnnnnnnnnnnnnnnnnnnnnnnnnnnnnnnnnnnnnnnnnnnnnnnnnnnnnnnnnnnnnnnnnnnnnnnnnnnnnnnnnnnnnnnnnnnnnnnnnnnnnnnnnnnnnnnnnnnnnnnnnnnnnnnnnnnnnnnnnnnnnnnnnnnnnnnnnnnnnnnnnnnnnnnnnnnnnnnnnnnnnnnnnnnnnnnnnnnnnnnnnnnnnnnnnnnnnnnnnnnnnnnnnnnnnnnnnnnnnnnnnnnnnnnnnnnnnnnnnnnnnnnnnnnnnnnnnnnnnnnnnnnnnnnnnnnnnnnnnnnnnnnnnnnnnnnnnnnnnnnnnnnnnnnnnnnnnnnnnnnnnnnnnnnnnnnnnnnnnnnnnnnnnnnnnnnnnnnnnnnnnnnnnnnnnnnnnnnnnnnnnnnnnnnnnnnnnnnnnnnnnnnnnnnnnnnnnnnnnnnnnnnnnnnnnnnnnnnnnnnnnnnnnnnnnnnnnnnnnnnnnnnnnnnnnnnnnnnnnnnnnnnnnnnnnnnnnnnnnnnnnnnnnnnnnnnnnnnnnnnnnnnnnnnnnnnnnnnnnnnnnnnnnnnnnnnnnnnnnnnnnnnnnnnnnnnnnnnnnnnnnnnnnnnnnnnnnnnnnnnnnnnnnnnnnnnnnnnnnnnnnnnnnnnnnnnnnnnnnnnnnnnnnnnnnnnnnnnnnnnnnnnnnnnnnnnnnnnnnnnnnnnnnnnnnnnnnnnnnnnnnnnnnnnnnnnnnnnnnnnnnnnnnnnnnnnnnnnnnnnnnnnnnnnnnnnnnnnnnnnnnnnnnnnnnnnnnnnnnnnnnnnnnnnnnnnnnnnnnnnnnnnnnnnnnnnnnnnnnnnnnnnnnnnnnnnnnnnnnnnnnnnnnnnnnnnnnnnnnnnnnnnnnnnnnnnnnnnnnnnnnnnnnnnnnnnnnnnnnnnnnnnnnnnnnnnnnnnnnnnnnnnnnnnnnnnnnnnnnnnnnnnnnnnnnnnnnnnnnnnnnnnnnnnnnnnnnnnnnnnnnnnnnnnnnnnnnnnnnnnnnnnnnnnnnnnnnnnnnnnnnnnnnnnnnnnnnnnnnnnnnnnnnnnnnnnnnnnnnnnnnnnnnnnnnnnnnnnnnnnnnnnnnnnnnnnnnnnnnnnnnnnnnnnnnnnnnnnnnnnnnnnnnnnnnnnnnnnnnnnnnnnnnnnnnnnnnnnnnnnnnnnnnnnnnnnnnnnnnnnnnnnnnnnnnnnnnnnnnnnnnnnnnnnnnnnnnnnnnnnnnnnnnnnnnnnnnnnnnnnnnnnnnnnnnnnnnnnnnnnnnnnnnnnnnnnnnnnnnnnnnnnnnnnnnnnnnnnnnnnnnnnnnnnnnnnnnnnnnnnnnnnnnnnnnnnnnnnnnnnnnnnnnnnnnnnnnnnnnnnnnnnnnnnnnnnnnnnnnnnnnnnnnnnnnnnnnnnnnnnnnnnnnnnnnnnnnnnnnnnnnnnnnnnnnnnnnnnnnnnnnnnnnnnnnnnnnnnnnnnnnnnnnnnnnnnnnnnnnnnnnnnnnnnnnnnnnnnnnnnnnnnnnnnnnnnnnnnnnnnnnnnnnnnnnnnnnnnnnnnnnnnnnnnnnnnnnnnnnnnnnnnnnnnnnnnnnnnnnnnnnnnnnnnnnnnnnnnnnnnnnnnnnnnnnnnnnnnnnnnnnnnnnnnnnnnnnnnnnnnnnnnnnnnnnnnnnnnnnnnnnnnnnnnnnnnnnnnnnnnnnnnnnnnnnnnnnnnnnnnnnnnnnnnnnnnnnnnnnnnnnnnnnnnnnnnnnnnnnnnnnnnnnnnnnnnnnnnnnnnnnnnnnnnnnnnnnnnnnnnnnnnnnnnnnnnnnnnnnnnnnnnnnnnnnnnnnnnnnnnnnnnnnnnnnnnnnnnnnnnnnnnnnnnnnnnnnnnnnnnnnnnnnnnnnnnnnnnnnnnnnnnnnnnnnnnnnnnnnnnnnnnnnnnnnnnnnnnnnnnnnnnnnnnnnnnnnnnnnnnnnnnnnnnnnnnnnnnnnnnnnnnnnnnnnnnnnnnnnnnnnnnnnnnnnnnnnnnnnnnnnnnnnnnnnnnnnnnnnnnnnnnnnnnnnnnnnnnnnnnnnnnnnnaggaaagaaggaaagaaggaaagaaggaaggaaggagactacatagtaaaacttgatggtacacctgaaagttccagaacaaaataaagaaaacataaccaaaaagagtagatggcaagaaataatcaaacacaaagctgaaatcaataaaagtgaaactaaaaacaacaacaaaaatctatacaaaaaaatcaatgaaacaaggagttggttctttcagaaaatcaataagatttaaaaacccgggctggagagatggctcagagcttaagaacaccagttgttcttccagaggtcctgagttcaattcccagcaaccacatggtggctcacaaccatccgtaatgagatctggtgccctctttgggtgtggagatatacatggaagcagaataatgttgtatgcataataaataaataaaatatatttaaaaacccaagttaactaaaagaaggagaaaatatctaaattaataaaattagaggcacaaagggagacataaaaacagatactgaggaaatccaaagaatcataaggacatctttaaaaatctgtattccaccaactggaaaacctaggctactgttctgctgaaagaatgcaacagaaaattaactcctaatgtcatcctgctgtactcatagatcagcatcttctacagacatcatctgagaagattcctcctatagtagataggaacacatacagagcctcacagaaagacattatacagagagagaaagaccttggaggaacacatacaatggtatgtctccatcaaatccatctcctcaggactcagggaaccttacagaagaggaggcaaaaaaagagcaagagaggatagagaatacaacatgtctgatgcacatatgcattcacagagactgtggcaaaatgtacaaggcctgcatgggtcttcaccagatggaggacacaagcccccatccataatatagtctccaactcataactgctcaaaacagaaaaatcagctttctccaatgaagtctaacttaaggatacaaaacactgttaagggccgttcccatgaccagcagcagatagatggccaaaacaaagcaaactcagtggtttgtatgggtttttcttctcattttattatttacctcaggtctttacccatgtattatggtttctgattctgtttgtatggtgtgtgtgtgtgtgtgcgtgtttcttggtgtcattgtatgttccttatactttttctttggatcctctttttctatttgttttgtctctggtttgttcttatttcactttttcattgttatttttacatgcttgtttttattccaatgagaaagcaaaacaaatggtataaagtaaatgccattaagaaatcttaggccctgataaagtccagggtttagcaatttagcattgaattgaaaaaaatatgttgtaagggagtcatatcaatcaattaaagagatagagaggatacaggaaaacaagatgtcacgaaagtcaaagaaaattatgtttaagtggggcaacaggaaagatggagcaatctctctgacagcacagaattactaaagtgagaggagctcattactgtccatagcaagatatttcagtggtgagatggaaggattaagattgcaatggattgcaaagtgggtaggaaaaatttacaataactctaggagaattggttgtcatagaagaaagaaaatatgtcagtaattacaggtggtaaaaaaataacatttaaaggcagtttaaaaccacctcattaatatataagtagtttaaaaatgaataaatattcatgcatctaaatacttactaaataaactgatatttttttaaatgcccagatccacaatagggaatccatatctggtataaaaattcaaataaaaaagcatacctggccgggcattgagggttcatgcctttaatcccagcactggggaggcagaggcaggcagatctctgtgagtttgaggccagcctggtctccagagtgagtgccaggataggctccaaagctacacagagaaaccctgtctggaaaaaacaaaacaaaacaacaacaacaacaaaaagcatacccgaagatgtcttatacactagggaaaagttaatgtttttttagatggattatcagaatgccaagctaccttcaaccttataaatatttgtatttataatcatagacaaaccgtcaggatatctagagaagctacgttgcataataaacagtctcatgtacacagacgatatatgctttttcaaggtagtgagaatttctgatggttaactcctcaaccctaaatagaacattcacatggccacctctttgtctgggggtcacagagtagtaggagaatggaaggagggggaggaggaggagaaggagaaaaggaagaagttgaaaaagaacaagaacaagaagaaaaacaagaaggaagaagaacaacaagaagaagaaaaaggaagacaaatgatactgacttctgtgcatggcagggaattaggttatgacctcacaccagctgtggatgcaagcaatgggccagtgctacaatggagccaacatcagtcacacacagattggagagagatccatagagtgcacctgtccctgctgaagcattagctacttttggggttttggaaaggagtaatcattgtcttctactgaatactcccgaagtgctcaacatgttccaggggataactccaaatccactgtcacagaagtgattcaggcgaccaggagatggggagaggaggaaggagaagaagaaaagaaaactatggagaggaagggagttggcaagtgtggaagggaaaacagagtgtgggttagaattatttatacatacacacacacacacacacacacacacacacacacacacacgagtaaggggtactgggaaaagatagatatttattgaaatgaaaaggaaaatgaaacattcaggactctatgttaaatccccatctggtctttctaaatcacacctacaatttcccaaagaagtaatgaacaaaatactttcactatacatcacttttatgatacattcaatttatattaatagaattaattatttttctagtatttaactcaattagtgaatgtttatgttcaataagtagcagcttgactaataaagttttattgcttattagcataaattcccaggagtagtgcctgattaacttcctaccaatggaaaaaggattgcttccagttttaactactgtgaaaaatacacctatgaaccttcttataactgtttggttggcagttgctttgtgtgggacatttttgcagatacacctggacttccatttattatagttacataagggatttggatggggaagtaaggaagtagaaacagaataccactttatagcttattctgattttcaactcagtcctcctgcctagttatccaaagggcttgggttagagatgtgttcctggtatcataatgggttatagattgtcagtatattcagtctaaaaaatgctataaatgaagccattaccttttaaataggtcagaccaaaatgcatgggcctgtcatttccctgtgtgtatactaaatatgtttacttctcctttggttggtattgttagggtttaaacacagtatatgctaaatttctatgataatggcctttgtccttttgcatatagtgggggctcaggtttgtgagggtgctcatagaggttatgcatactgcacgtgtggaggtcagagcacaacttcaccttagaggtcatttcccagttgtggtttctcaggtgctgcccattttgtgttttgagaaagggtattttatttacctagaactaagcaagtaggccaagctggctggccagtgaccctcaggggcttctcagcttttcctccctgtcctagggttacaagctcagcccagcactgccagctggtcagtgtgagcagaaatgatcagactcaggtgttcatgcttgcacagtaagcattttcccaagtgaattctcactttggcaatttttcccttatattttaaaatggcggtatatttttcactgtattattacccttccatttctttgaaatactcaatttcactttagaatccttcaaatgatctccattccacctagtttgtactttaacttcaattgatacacttaggaaaatatttctcttctctttttttttttctcaacaatattaaaatttgttattgtcattgagttagcaggaccatcttctacatttttccactagaatttttacaaataaaatacaaaataagtgaactaatagctttcagaataacatggtaattcaaagcttagtgatagagtttatgtgtaacaaagtcctggggaaattgaacttttcttcaagctgctctctctttaaagtggttctggcataattgtaatgttcatagcagcattacttataatagccagaacctggaagcaacctagatgcccctcaaatgaagaatggatagagaaaatggttaactcctcaaccnnnnnnnnnnnnnnnnnnnnnnnnnnnnnnnnnnnnnnnnnnnnnnnnnnnnnnnnnnnnnnnnnnnnnnnnnnnnnnnnnnnnnnnnnnnnnnnnnnnnnaactagaagaaaccattctgagtgaggtaacccaatcacaaaaaaacaaacatgatatgtactcactcatatgtggattttaggcatagagtgaaggattaccagcctacaatctgaactgccagagaagctagtaaacaaggaggaccctaagagagacatacattgtcccctggagaaggggaaagggacacgatctcctgagcaaattgggggcaagggaggtgggggaagggatctaggagaatgagaaggggagaagaggagggatgcaccggacatgagcaagcagaaaggttgagtcaggggaagaatagaagataacaaaaatggagatatcataatagagggagacattttaggtttacagaaaaatcaggcactagggaaaggtctggagatctacaaagatgacaccaactaacaatctaagcaacaggggagaggctaccttaaatgctctcccctgataatgagattgatgactgtcttatatgccattctatggcattcatccagcagctggtgaaagtagaatcagacatccacaactaatcattgaactgaactggaatccagttgcagagaagaatgattgatgggcataggggtccagaccaggctggtgaaacccacagaaacagctgacctgaacaacgaggagtgcttggtccccagactgatagctgggaaagcagcatgggactgatcccaggaatgtgggtttcagtaaggagacctcagaaatctatgagacctcctgtagttcagtacttatccctagcataggtgtggactttgggagcccattccatatagaggaatactccctgagccaagacacacacacagggggtggacctaggccctatcccaaaggatatgatagactctgatgaccccctatggaaggcctcaccctcccctggggagcagaaaggatatgtgataggtagggttttaattgggggcagggtgaggggaggagaggagagagtgggagctgtgattgacatgtaaaacaatcttgtttctaattcaaatgaaaaaataaagaaaaaaataaagtggttctggctatggtagggaggactgcaatggattatgagtcacgaactgctaacagtggtgaatacaaacacattgttctttttttcctttgtatccaaattttattagtctataaactatatatcacaattttagtgaaactttgtcagcctccattgtatcctgcgagtcatatcagtattcatctctcccctttatctgctcattttaaaaagtcacagatttcaaattatgtcttgaaagcctaaactccactgcttctcaagcatggtgcatgtgttttagtgaagtcatattgtactatgtacatatgtaaatatgtactatttacatggttctatgtaaatttcctgtacagatgattgcttcttaaacatattttactatgcccttttgtatatcctattataagtagggttttttcttttttaatttttttatttaaattagaaacaagcttgtttttacatgtcaatccctgttccttcttcctcccctcctcttctgcccccactaacaccctacctatccaataccatttctgctgtccagggagagtgaagccttccatggtgggggtcttcagagtctgtcatatcctttgggataggtcctaggccctcctctgtgtatctaggctgagggagtatccatccatgttaaatgggatcccaaagtccattcctacactagaaataagtactgatctactacaagaggccccttatatttctgaggcctcctcactgacacccacattcatggattctgaatcagtccatgctggtttcccagtgatcagtctgggggccgatggctccctcttgttcaggtcagctgtttctgtgggtttcactatgggggtcttgacccctttgctcatcactcctccttctctgaaactggattcaagttcagttcagttcagtttttaactgacaaacacattgttcttaaaggtcattggaaagtttaggcttaactattttagtaaataagtgatgagcaagatattttgctttacaaacatctgaaataagttggaattcagtcttcacattaataaacatctttgtgacatgccaagaagctgaaatatgcaaagtttgatttcctacacagtccattttccacaaaagacagaattgttgaattacatttcttgtttttcagctgtaaactcttacatttcaatttggggcacaattaggggtgttataaaagatttttatggtctttcgcccagtctcagagccaattattgtactgtttgaatattcagcaagtcgttaaaatattgctcatttcccttgttatttacttcttgctaaaactgttataataaattgtggctgcactcacagtgatttgcttacagtttctataatgtactcaacagtcaaggaaaaatattgctctgttgagtgtcagaataaaaatgaagggtgcatgagcactgtcagagtgagtatctcagtccttattccaggaggtatgctgtaacactcaactccagttttggaatcttggtggctgaagcactgtttcctaacagaaggtgctcaggaggcaggaggggaatgtctgctaagacatacaaatagaaatacccagaatgcacttcatcactgagaaaatgttgtcttccatcttaattttcaggacacaaagaataaaactataaagtataaaaatgtttgtggaagacttcatcttttctatagaacttaggtgcatgtttctctgagactattgttctctccctgcactgcttgattctaaagccatttcttaaccacatagtctctaatggagaaaaaacagggaattagagaatgatgcactgaacgtagaatccacagaaatgttcacatttcctaaaacctcagacatacacatttttaattgtcttaatgggttaaattagacctttgcattacatattacacacaattactttcatttcttttcattaccttattcatattataacagccattgtatgaatatttacagttatttaatcttcctattaattaataatgacataagtcctactatggatgagaaccacaatatccatgtgaaatatttgaggtagatgagtttactctgtacactctgtttttaagaaaaatgtttttacttagtagaattttttacattgtgttatcaacacacagtctctgaattttcaacatgtcaagtaaatagaagtttacaaaatttacaattttgttgcataaattcatgtctctctaccaatgataatatgaatgtatgttcatgtctgaatgaaattatcatttaaaggttttgttgttgctactcttatttatttttgttattaccaaaatcttacttatgaataggaactaattgagtactcaatgacattttgggcaaaattttctcaatttaatcttttgattttatctcaaaaactaacaaaatattcatcataaaattaactttgcatgcctgcaggtaatgcatacctgtccaggagggaaaaacaaagacaaaacatagagtaatggatttatctttagttgattaaatcccccactgtttagatgaggtttagcttttccaaaggttagaccttcaacctgtctatcatatgagactttgggaaaccttagctgcaaaagtgggcaagaaaactagaagctaaaattgccactgttccaaaaaaagaaaaagacaacatttctttaaaaaggtaaggaaaataaaaactcattttgtttccatatagcatttttacaagtcactgattggctccacaaatgaatagcatcctctattgatgagagttttcagtaagtgaccttgtgagaacatgtatgaataatctgttctccaattttcacatctcttgaaaccgatgaagatcaatgttcttttcttccacttgttgtgtggtcgcatttacccatttcccccatccagcttcccatttgccaccaaacttaccctctttctgactcaatgtctttgttttgtttcgttttataaaacattaagtacagttagtgctgtccacaaaagcataggtgaagacatccactagagcatggaaaatctaccccaaatgccacatcctcaaaagagagcaattctcttctcccaacagttatctaatgccaatagctcctcagtatggagctttcctgatcctgtgcaggtcttgtgcagataacctcagatggtgtgagtttgtgagtgaaagagcaacatcatggccaacaaacagcatttcacagaactcctccccatcctcctgctcttacagtctttctgtcatctcttcctgggtgttgcctaatcctctgtggtgatggtagtgggggcttgataaagatgttccacaagaaaataatgcctacatagcttgtgatatggcttacatggttgcagtatttttctgctttgttctcaaatttcagaaactgttgcctttgatccccagttatgccttaacttaaataggatagactttccttggtttgggattgtgaaaatgctaagtaaggccatgtagacaggaatccagcttagatggtctctctcctgaaaaggagaaagctgtggaagggttgaacagactgaaacatatgtccaagaatcaaaaggaaacatgagtaagttatattaaaatattattaaggtttcactgatcagttataatgactttacaatttagagactatggacaaagatcctgcagtggcttgagatgaagcaaagaatacattctaatggcctaatatatttgagtgaaggagttaagaggaaggagaaaagaatagtttaaaaatgtccctgtaatgaggtagaaatgaaggacatcaccattaaaggacctcataggtactgtgcaccaaggactgttagagggactaatatcaccaaaacacaagatcacaagaagccagtgttctccaaaatagccagtaagcttttctatggaaataaatgcacatgcaatcagactgatagacttttcattccacccaatagttgctcttgttgtctatgtattaataaatgcctaataaatcaaatagctccacagaaacaggtaatatttgaaactcaatgccagaaactaggtagaagttgtaaaaagtggtgattacttttgaaagtgattattttaatcgatgcctaaattatgttggtcatttagtgaaagtagaaattttgagtagcattcaatatatgtgtaatcagttcagatgactaaatatttctaagaataaataaggaccagacaaagttaaattgaatgaatatgtagagattcagtaagaaaacacagttttttccaaagatttagaattccaggaataggtgaggataggaagccaggaacaggagacctgaagggaatgttaacaagtgcaatgttataacaagttgctatgaagatagaggccattgtacccagcagtagtaaatggaaacaataaccaaaagaagttcagcctgtgtggcatacagcttgtaaacaggggagaaaagcaaaagaagagccctggtccttgaagaacaataacaggtcttaaaagaagagtcactagggaatgaggactgtctgtctacattgctagtgccagagtttacagaggacttacagatcatgtcaagctttatactctacttctagctgataatttcccacttggttctaggaaaaactgtgttatgaagactgtgaagaaaccttaaatctcttctaaaaccatgtggctggtaagtccactttataactcatgcctacacaagcagactcaacattgtcatcgggcactgccctgcatgatgttccctgattatgggtcagtgcatagagagtggtgcaacaatcatagtgaagataattttatatcattgagttctgcagaaatgactcagttaagacatttgccattcttcctgagtaccagagattgtttgccacaacccatgactcaccaacactcacaagagcctgtagctccagctccaggtgatatgtaacacgctactcctcctgatgggcacctgcacacactggtgcttacacacatgcactcacatatactcacccatacacaaataaaagcaaaatattttaaaggtttttgaataactttatagctcaagagatttttaagggacatcaacacagatgctaaatgttgtcagctgagtaagaaaagcatccagaaatcatgacaaggggatgaggaaagaaatgactaaacaaaatattataggtaaccaaaaaggtaactaacataagggaataatgttccaacacaagaagaaggacaatgatgggttcccaggagtatattacaaggtagaaagaaatggataacatagaaatttcaggaactctgtttaccagagaaaaaggtccacaggcataataagaagcagcaggtggaagcaagcatgaagagaatgggctgagaggatggcaacaccatgaactgagattatgatatagggagctaaccacaccaaccccagtctgagacatcaggccagctactaaatctctccttgtttctgtttccgtgaagagaatctggtaatacccatacagaaatcttattagaaccatgagtgtagtattctgagtaattctcacagtctaagaaaggcaatgaattaataccagaccttaagccttctggatgcctctgtgtctcttcttgggtcctgacctacacaaccatggtgtgtacagggtattatagcaccatcactatttttgtgcctgaaattttcaaaataaacacacacatatttctctaaaattctctaaaaggaaagtactccataagctgactaccacacatttctcccttctaacacaaagaaagtcaacttctcttaaagttttccaggaaaagtgattcgaaaaatgcccttgctaatgtgtttcatctcagcgtattcccttgtacgaatcataatgaaagaatactgctggggtgccaaaacctaaaaccaactgtccactgctgagatgctaagtaggcagggtactaattcactgtgcttcctttgtctttttagaggtcactgtaacagaacaatcccaacggaggtgatgcccaccagctaacagtgattattcagcacaaaggaacatatgcaccatgtgaacaagagccaaaaggtgctgattatagaatggtttaaaaataaaatagacagagccaaaaataactcaacaacttaaagaacagcctcagcttcactttgatggcatgtccccttaacttcttcaatcagaaatattcttttatgcattcatccagtcatcagcccagtgaatactggagtgcctaatattctcagtgctgtactgaattacagggatatttataacaaagagcaatattatatttgagacataaggacaaacattattttgctttgatgatgtgaaggagtacaattaataaaaatattcttgttagccctagtttttgaacagtagagaaagaatgaggcagatggaggttgaaatgtcagctgtatcctgatgtctctgtctcacgggaacagaggtctacctcattctgccttccagaattagacatacacttcctaagacagcaatacatcaaagagcagtcacactgtcccttcagtgtcctccctatatgccctgtttctgaaactcttgtgacatgagcaatggactgaaatcctggagtttaatgcgcaaggcaatcatcatgaaactcatccttcccacactgagtaccatagccaggtagctgcagaaagctctgcacatcaaaagcctgtctctctatccctgggatctgtgctacacttgagcaaaggactacagcagaaatgaaggtgtgccttttgaaaccctaggcctcccaaagccttacagatttgttttgttttttgttataaatgcagccctgacaagaacaaagccaagcttgcctgctaaagggtgaatgatgatttagcgcaaagatgagccctaagtagcccatcctgatccagccaagctcaactattaagtgttgtggctgatgaatgatgaataagcaaagaccagtgtgatcagcggaagagccaagctggcctcacacagcagcattcagtctctgaaacactgaaacactgatgttttgtcatacatcagtaatatcttgatatgctggcatctaatgacccattttctattattaaattctagacttgaagctctaaggcatgtgtaccaggagatataaacagtggtgttcatgccagaacattttgtaagaatacaatacaaatgtaaaacaaatcaaaaattttaaattagtattaaataagagctaaaagtagatataacatatgactcaatgggggcttacatggctttggaaactgacaattaaaaacacaggtgtcaccatgggtaaattctcaagtgaaaagtcatacagtgtcagctaaatgaaaggtttttcatacaagaacaataagagatcaaactgtaaaatagtattaagaggtatgtacaagatgggaaagtgtcttttaaaagatgatgaggaaacccagtcatggtttaggatagtaatcatttctagatatctaggagaaagacattggagtaaaataaaccagagacttcccagataccaaaaatattctgggtcttattttgttattatcattgatagtttatcaaacatgtattctgtaaatacattgtatgagagacagttttaagttacattcatttatttatttgtgtgtagaggtgtacatatatggaggtcagaggacaatatgaagcagtttattctcactaccatgtgaacctggggatggagctcacttagtcaagactggcagaaatttattttactgagtcaccttggtggtctaagagataatttatttaagtaaaatgatttaaaagagtcaaaatggaaatgagggaatcagtcacagggcactataacagtatacatgtgatgtttgatatatggctatgctaaataaatgtgatttctgtgaattatattaagaatactgtattaggacatcagaggttgagtgttagtggctaagcactatgtgttaattatgttaatgaaataaatagtaaaaaagacaaaccaaaggtatgcgggctgtatagataaatagcctatttttccatggatttgtcaaactaacagatgtatataaagtaacatttaaaacaaatggagcagttctgaaaggatatgtaagaaacaagcacagcaaggccctttagcactgaacagttgtaacaaaggacaactgtaaagaagacattgctgtgccccagaggacaactgaaacagtgaaatgcattgtaaagactaaggagatactgcggtgtgctataagacaattgaaacaaatagagacattgtaaatactgcaaaggagacatagcagagtactgtaggaaaactaaaactatgaagagcagggaagatgcatcataaactagttaacaaagttcaaaagttacctactcaatactaaacagccactaccaccattccatctctaacccctaatacagtgttgtcacacattctgcaatagcaacattcatatttagaccagcataaagcaaccaaaccaatggtttaaaaattatacttatgaattagaaaaatgactcagattaatcaaactgaaagtcttggagaagattgtatattagaaatctcttatatggtaaacttggagttggatttccttatcaatgattcatcaaagtccccttctacatggtgtagagagactatcttgatgcaagtatggtgtgtgtgtgtgtgtgtgtgtgtgtgtgtgtgtgtgtgtgtgtgtgtgtgtgtgtatggttgcagtattttnnnnnnnnnnnnnnnnnnnnnnnnnnnnnnnnnnnnnnnnnnnnnnnnnnnnnnnnnnnnnnnnnnnnnnnnnnnnnnnnnnnnnnnnnnnnnnnnnnnnnnnnnnnnnnnnnnnnnnnnnnnnnnnnnnnnnnnnnnnnnnnnnnnnnnnnnnnnnnnnnnnnnnnnnnnnnnnnnnnnnnnnnnnnnnnnnnnnnnnnnnnnnnnnnnnnnnnnnnnnnnnnnnnnnnnnnnnnnnnnnnnnnnnnnnnnnnnnnnnnnnnnnnnnnnnnnnnnnnnnnnnnnnnnnnnnnnnnnnnnnnnnnnnnnnnnnnnnnnnnnnnnnnnnnnnnnnnnnnnnnnnnnnnnnnnnnnnnnnnnnnnnnnnnnnnnnnnnnnnnnnnnnnnnnnnnnnnnnnnnnnnnnnnnnnnnnnnnnnnnnnnnnnnnnnnnnnnnnnnntggtgtgtgtgtgtgtgtgtgtgtgtgtgtgtgtgtgtgtgtgtgtgtgtgtgtgtgtgtttaaaaccattccacaatcatttatatgtttaaaggttatacaagcaaaaaatgcattcacactgagaagtttcttgagtgtcataataaattgctcggtgataagtcatattcagatcatttaatgttggataacatgaaacaagtcagtttaccataaaggtagataattgattacagcgaagtttaagccacaaatagacttccagctactaactactgatgagtgacgcatatatttttttttaagttgcaggatagagtttctccttatcctattgtcagcctcaatgttttccaatctcagagtagacaatgccccacttaaaaaacagaaacccagctccaaatgatcaaaggtgaaggttgagattgactggtgctactgggtcccgtggtaacttttgaggttccctttagtgtctttgggtttatgaccacaggactcctcaagaaacattccatgccacccttgctccttaatccatttactccaacatatttgctctaggctgccttgcttctcagtcctcagcattgacccaatatacttctcattatctcaattatgagatttgtttggtcatgtttattgccactctattaacaacagctgagcatggaaacaacctaggtatccatgaactgatgaatggataacgaaaatgtggtacatgtacatagcattcagctataaagaaaaactgaaatcatgaaatttgcagtgaaatggatagaactagaaaatgttatactgattgaggtaacacagtctcagaaagacaaatgcttcaggcaatgcattctctcatctgtggatctagcttcaaatcttcatgttggagtagatagattggaataacctcagaaattagggaggtaaaaagggaacacaggaagtgagtaccagaaattggagtactcagatacaaatgctatgaagtaaatttcaagattctattgttttttctgctgagtagtactccattgtgtaaatgtaccacaatttctctatccattcttcagctgagaggcatctaggctgtttccagtttctggctagtacaaataatgctgctatgaacatggttgaacatatgtccttgttatatgaatgtgcttcttttgggtatatgcctaggagtggaattgctggatcttgtgatagactcattcccattttcttgaggagtcgccatactgatttccacagtggatgtacaagttggcactcccaccagcagtggaggagtgttcttatttctccacatcctatccagcataaactgtcattggtattttcgattttagacattctgacaggagtaagatggtgtctcaaagatgtttgtatttgcatttccctgatgactaaggatgttgaccactttctcatatgtctttcagctatttttgattcctctattgagaattgtctatttagttctgtacctcactttttaattggattgtttggtgtttgggggactagcttcttgagttttttgtatattttggagatcagacctctgtcagatgtggggttggtgaatatcttttcccaatctgtgggctgcccttttgtcttgatgattgtctcctttgccttacagaagcttctcagtttcaggaggtctcatttatcaattgttgacctcagtgtctgtgcttctggtgtaatgttcaggaagaagtctggtgtaatgttcannnnnnnnnnnnnnnnnnnnnnnnnnnnnnnnnnnnnnnnnnnnnnnnnnnnnnnnnnnnnnnnnnnnnnnnnnnnnnnnnnnnnnnnnnnnnnnnnnnnnnnnnnnnnnnnnnnnnnnnnnnnnnnnnnnnnnnnnnnnnnnnnnnnnnnnnnnnnnnnnnnnnnnnnnnnnnnnnnnnnnnnnnnnnnnnnnnnnnnnnnnnnnnnnnnnnnnnnnnnnnnnnnnnnnnnnnnnnnnnnnnnnnnnnnnnnnnnnnnnnnnnnnnnnnnnnnnnnnnnnnnnnnnnnnnnnnnnnnnnnnnnnnnnnnnnnnnnnnnnnnnnnnnnnnnnnnnnnnnnnnnnnnnnnnnnnnnnnnnnnnnnnnnnnnnnnnnnnnnnnnnnnnnnnnnnnnnnnnnnnnnnnnnnnnnnnnnnnnnnnnnnnnnnnnnnnnnnnnnnnnnnnnnnnnnnnnnnnnnnnnnnnnnnnnnnnnnnnnnnnnnnnnnnnnnnnnnnnnnnnnnnnnnnnnnnnnnnnnnnnnnnnnnnnnnnnnnnnnnnnnnnnnnnnnnnnnnnnnnnnnnnnnnnnnnnnnnnnnnnnnnnnnnnnnnnnnnnnnnnnnnnnnnnnnnnnnnnnnnnnnnnnnnnnnnnnnnnnnnnnnnnnnnnnnnnnnnnnnnnnnnnnnnnnnnnnnnnnnnnnnnnnnnnnnnnnnnnnnnnnnnnnnnnnnnnnnnnnnnnnnnnnnnnnnnttggcaattgtaaagggtgatgcttctctgatttctttctccaccaatgtgtcatcggtgtatagtagtgctatggatttttttttagttaatcttatatcctgccactttgttgaaggtgtttatcagctgtaggagttccctggttgagttttttgggtcacttatgtagactatcatatcatctgcaaatagtgaaagtttgacttcttcctttctgatttgtattcccttgatctccttttgttgtcttattgctctggttagaacttcatggacaatattgaagaggtatggagagagtggacagccttgtcttgcccctgattttagaggaattatattgagtttctctccatttaatttgatgttggctattggcttgctgtatnnnnnnnnnnnnnnnnnnnnnnnnnnnnnnnnnnnnnnnnnnnnnnnnnnnnnnnnnnnnnnnnnnnnnnnnnnnnnnnnnnnnnnnnnnnnnnnnnnnnnnnnnnnnnnnnnnnnnnnnnnnnnnnnnnnnnnnnnnnnnntttttttcctcagtctgtttatatggtggattatattgatggatttttgtatgttgaaccatacttgcatccctgggatgaatcctacttgatcgggatggatttctttgatgtgttcttggattcgatttgccaatattttattgagaatttttgtgtcaatgttcgtgagggatattggtctgtagttctctttcttagttgtgtctttgtgtggcttgtgtatcaaggtaattgtggcctcatagaaagagtttggtaatgacctttctgcttctattgtgtggaattctttgaggagatttggtattagctgtactttgaatttctggtagaattctgcactgaagnnnnnnnnnnnnnnnnnnnnnnnnnnnnnnnnnnnnnnnnnnnnnnnnnnnnnatttccttagaggttataggtctatttaagttgcttatcggttcttgatttaattttggaaagtgaaatctgtccagaaaattgtccatttcctttagattttcaaattttgaggaatataggttttcaaagtatgacctgatgattctctggatttccaattttattaatatgtactctttgttgtttgattagtttggataaaggtttgtctatcttgttgattttctcgaagaaccaactttttgttatattgattctttttattattctcctagcttcaattttattgatttcagccctcaatttgattatttcctggcgtctgctccnnnnnnnnnnnnnnnnnnnnnnnnnnnnnnnnnnnnnnnnnnnnnnnnnnnnnnnnnnnnnnnnnnnnnnnnnnnnnnnnnnnnnnnnnnnnnnnnnnntgggcatttagcgctatgaactttcctcttagtactgctttcagaggtttggatatgttgtgtccgcattctcattgaattctaggaaatctttaatttctttttttattacttcctggacccatgaattgtgcaattgggtgttacttaatttccatgagattgaaggttttctgtagttcttgttgttattgaattctaatttttaagcagtggtctgataaaacacaggggtttatttcaattcttttgtacttgttgaggtttgctatgttgccaaatatgtggtccattttagagaaggttccatgtggcactgagaagaaggtaatttgttttgtatttgggtggaatgttctatagatatatgttaagtcgaattgtgccataacttctattagttcttttgtttctttgttaagtttctgtctggtgttcctgtcctgtggtgagagaggggtgttgaaatctcccactgtaagtgtgtgcggttttagtgtgatttgagttttagtaatgtttcttttacaaatgtggatggcttttgtatttggggcataaatgttcagaattgagatttggtcgtgatggctttctcctgtgatgagtaggaaatgaccttcttcatctcttttgactgattttagtttaaagtccaatttgttggatattaggattgctacccccacttgtttcttgggtccatttgattggaagatttttccccaacctttaattcttaggtaccgtctnnnnnnnnnnnntgagtttcttgtatgcagcagaaggaaggattctgtcttcttatccattctgctaatctgtgtctttttataggggagttaatatcattaatgttgatggatattaatgaccattggttattgttcattgttgtttgtttttgatttagtgatggtggcaaaatgatgtgtgggattctatcccttttttcttttgattgttggaaaattgggattatctattgcctttgtttttctggcaaaagttgtagttaacttccctgggttgcagtttaccttctagtactttctttagggctggattggtggaaatgtattgtttgaatctggttttatcatggaatatcttgttttctctgtctataatgattgaaagctttgctgggtatagtagtctgggctggcatccatggtctcttagtgtaggtagaatatcgatccaggaccttctggctttcagagtttccatggaaaagtcaggggtgattctgataggtttgcctttataggttacttgacctttttcctttgctgctcttaatattttctctttgttgtgtgtgtttggtgttttgattatgtggtgaggagaccttttttgttcagtctatttgttgttctgtaggcttcttgtattttcatgagcatatctttctttaggttggggaagttttcttctatgattttgttgaatattttttctgcacctttgagttggatttcttctccttcttctatacctactattcttaggtttggtcttttcatatgaattttagacatagagcaaaggattcacagtatcccatatttcctggatattttgttttagggatttgctgggtttaaaattttctttggctgatgagtctatttcctctagagtatcttcaactcctgatgaggtattactggtgtatggttcctagtctccagtggtgttatattgggttttctgttgttggatgtgcttttaccttgtcctcttctcatcctttcttctggtgggtgtagcaagtgtttcttgttctcctgatgggtgtggggccacgtttcccttctggtagatgcaaacagatccaatactctgatttaggttctcttctcgtggatggaggtgtcactgttacccgggtgtcggcaatgtctgggcgtgccgggtcccgctgggagggcagttggaggcagagctgtcactgggcctcaggttgtcagatccccctgccgaactccttaaggacacttgtgtcagatgactctgagcagcgatgatgaaccagaactggaaacagttcctggcctacctgggccggcagatgtaggccgggctgcctctgggtgttcggtgttcgtaacctgccaccaccgaactaggtccggcaggcaggtcgattgtgtcagatgactccgtatcttcttatgttttacttttatgattgttaattttggatactttacactgttaagttttaatcatcttttagactaaaaggggaattgtaggggaagctgtagccatgcctacttagggactggctgcagatgtgcctgaccacgctttctcttttggtttcacttttgtacttgcggtacagactgctgccacaccggcctgctaggttgctctgtaagtcaggcttttccctattaaatacccttatatttctacttggctccatattggtaatttcccactatagccatgtttaaattttgcaagaggaatgaataggttttaattgtgagcttgtcatagatattgctaagtagattagtcttttgctgcaaagttgatacttggcttcagaacaagatggaattagtatttatggcatatctgtaagtttcaggcctctacattttttgtttaagtcaaattgaataccatcgtggaatgtattaagtactttttaaagttataatcatggaatattaaaatttccccaatctcatcattttatattattgtattgatctatgttcatgtactattttagttttaattgatatgatgattttgtatatttgtgggtgatgtgtgggtgtgatgctttatgtatatgcaatgcaggtatgcatatactatgggagatgtcattgtgtaaatatgtttatctttttggttgtcgaataaaacactgttggccaatagggcagcaagataggtaggaccaggatatgaggaggattctagaaagtgtaggcagagaggaatcatcgtgtgatcccaggaagtggtgtagttgggcagaaactgccactagataaccatagaggtctagaggtctgtacagacaggcaggaagtgatgtagctgggtagaatcaaagtataagcagggacaaacaggaaattgttttcttcttctctcttcattgctgagacactgaacagtcaagatttaggatgccagagagtaagaggtccctggacctttctccagtaagattaagaccacgtggaaatgcatggattattagaaaatgggtcaataattaaggctgatctagcaaataagaaaccttagccaatggccaacagctttataattaatataagtcttgtgtgttaatttgggacccagacaactggtggaaaagactacacataacacatatatgcacatatataatcagtcctaatgggatcattcaggatcctctcttccatttatgtttagaatataataagggctgaagatattatctcagtgattaagagagagtgttgcttttacagtggacccaggtttgattcccatcagtaactctagctccagtggacctcatgaccttttttgattccattaataccaggtccacacatggcataaacacacatacacatgaaataaaataaattaacctattccatgtgttatggtgaagtttagtcataggctgaattagaaggagaaagtgagcttagcatcagcattcatcgtgttctgctttctaactaaggatgccatgtgactaggggccctctgttcttgtcactatgcttttcttgtattctgttggttatgcttacatctgtattcccccaaacaatgagcaacaataaacccttcctctcttaaggtgattcttgtcctgtgtattgtcatagtgaaagcacaggtgactaattcagacagaattaaatctgcattgaattgtaactctgatacattagttacttgattttcagggattaactgctgtatacttactttttctatctgttgtatggaactgataatataaatctcatgctcttttaatgtatacatcaagaaatacacaaaaattgtccaggtcactattgcataacactataagtagaatttctcaattatagggcacaggtgttttgtaatgtgatatttaatttttaaacattaacaaaaatataatattttacactattgtaattgccttcacaaatagtaatccacttaatttttcaaattgtaatacaactaacttatattagttatagtctagaaagcagcttattcaaaatgaaaatttaattttttaaattatattactcattcctcataggatgaatcattattttattttaatgagacaagaaaaactttgctgtcatgtctgtcttctgtttctaggaagaaatcaattttgtaaacatctggatgagaaaagggtaaactttttaattgattaatattgtaatgtccaatgagtgggcacatgaagatccagagagtaggctcttcttcctcagagctgcctggcttgcactcatgcttaacccatagaaaagagccgagcaggtaacagtctcattcttgctttataggactttcaaaagcacctgaaatttaaatatctatgtctcctccccatctctctcttttttccttctccctctccactctcctttcttggttcacatgtagagatcagaatatatcttgtaggagatggatctttcaatcatgtgtgccccatcatcaaagtgaaataaataccttcagattgtgcagcaagtgccttcacttgctaaagcatcttggcagctcctttctggtatttctaatctgagcatttagagacaacaggaatgagaaaaattggggagagaaagaaaagttgatattaggtggaaaaaagccctcttgagtcaatacacaattagtgtcattaaataattactaaagatgaatgttagatgagcatgcttagtgtttgtagaggcactaattagttaattatgaaaagctaaaccaacataaaacctctctaagtgccttttcctttcatagttttgtttttaaatatgacatgatcacatgatctcctagggaaatgtgaacaattaactaaacaaataaacaattgcactatgtccagcttgatgaacctctgggattcctggggttagaggagcatggaaaagtccactccagaagaagggtgaggactcacgaaagctacatttcccgcagtgcctttgctggcagccatgtcacggaggaacttccttgtccagcaactgattactgtctgtatcacttagaggaggtgatccttgagtcttgtaacttcttcatgcaatttcactgccagtcttttgctgtccacaagggaatgttccattgtagagaaaatcaacccacaacaaatatcactgtacaaaaaagaaaatcttctcaccacatgtaccaaacaataatgagccaaatacctagaaagcctcaagtcaaattagggttctagcaataggaggctattttatacaatataacagtgttcacatgtatttttgaattaatagaaacaatgatgtctctctaataattatttggtgtcagtgagcgggatgaccccatgccccaaggttcccagagaaagagggaaacctccaccacagcctgccctgttgtgccactgagaggcatcagagcagtttccatatgcttgagccatccccgtgcttctgggctttagactcggcactcccaagatgataaagacagatccagataaagaaaaacctctaaaggtttacactgcattgaaaaatatatgtaggcttgcgagagaaaaaaataacaggaggaaatagagtagccggttgtggtggcacacaccagtaggatttgctgaaggaagcagaggcaggtggatttccacagagaaaccctgtctcgaggaaaaaagaaacaaaagaaagtaaaaataaagtattaaaaaagccatataaagatggaaaatacatagagaatctggatactatatgccatattgttgtctttaaatggtttgattgccgaggaaaaacttattgctgctaaaatgtatttgattataaatactgctaaattaatccaacttatacatttttaaaatgctctaacttcaaaatttaagtctaaggacaggctacctagaaataaaggttttgcttgtatttccacagaaaataaaaaactgtggattccttccagactattatagtttgatcaagcaagaccccctgaagctaagacgatacagtcttacagactaaaaaaaacaaggacttggtcaggtttctatgttttatcagattcccatggtatagccnnnnnnnnnnnnnnnnnnnnnnnnnnnnnnnnnnnnnnnnnnnnnnnnnnnnnnnnnnnnnnnnnnnnnnnnnnnnnnnnnnnnnnnnnttagttataaatgataatgagcatagtcaatttctttttaaagaaagaaaaggggaataggatataggaatgaatactttgcattggttgatattttcatttattgatacaactttaaggtcaattttgtgatatgtatatgtctcctcttgtttaggtattgtgtttatacagatcttttacctataatagtcagaacttatgattaggttagttaggttttctagatatacagagatgtatttgagatggataggtattcttcgaacctttcaagaccttcagaaatatggcatttaaatggtttagggtttttcttggcagtaagacacaactgctcctggcacaccaattacgtcagaaaggaggatgagcatggaagaaactcattatggagtttgctttcaacatggcaagattagccatttgggcaagaaactgctcttgcctggactgaaactactcttgcctggactgtttgttgctgtataaactggatatgcaggacccacaaaaaagtgactgctgaacttacaaaacaagacagtactgaagggttcctgttaaaatggagaagtgtgctagacacactgtggcctatgggctgaagatggatgccccaatgttacagaggaactttgggtgactgtccacgtagcagatgtctctctcaaatctagagtttatatattatccttctatggtctttgatagagttaaagacagatagttatggttatagtcttcttcagttattataaaagataagttatcctttttatttagacagaaaagaggagataatggggaatgtactgtgtatgtttatcttattgattgttgaataaaatactgcttggccaatggcaagcaaggactaggagtcaaagaggattctgggaaatgtagtagagaagtgctgatccaggcaggaagtgacatagcaaggagactcctatttaagcaaaggagaagcaggaaggtcccctcttttcctattcacatcctccagcggcacaatgtgatccactggcaaggagggatgccaataaggcnnnnnnnnnnnnnnnnnnnnnnnnnnnnnnnnnnnnnnnnnnnnnnnnnnnttataaaatatataggtttatgataattaagactgagctaacagatgagaatcctagtcattggccaagcagcattgtacctaatacaagtttctgtgtattcatttgggccctaactcaggtgggtggctggcataaagctcacatgtggcggtggggctcaggcagcttttggcggaaagatttatcataacacatgactaaatctttaaggtattttaaagaaaaatagtgtattcacttgagaatggggaggtacggaagggtttggagggaggaactgtcaggaaaaagtagtgcaattctgtttcaattaaaaacatgcttctaaacatatttcaaaatgtggatatgtgggctggaaagacagcttcagcagttaagaacccatgcagttctttcagggacctgagttcagttcacagaacctacatcgggtggcatgtagttgtacctgtaactattttccagggggatattatgtccctgtcttccacagtcacttatcctatgtgccataccaccacagacacagacacacacacatgcacacacacacacacacacacacacacacacacacacacacacacgtgcatactctaatttttaaataataaaaataaatcttacaaatataatatatgtctgtatcatattttagaatataaatgaataatgggcttctaaaataaatatgaaaatatagatttcctttgattttacacaatcattttgacctatcccaaaatagatgacagcaaacatcagtcaattcctcttcatagatactaaacatggctatctacttaactatatgaaatccaagtaagatgtatttgtccactgacaaggattgtgtaaaggattgtgggggatcaataatatctgctgcaacgtcaacaatctgaaatttttgatgcattcattatcaggatttagcagatatttagtaactgtccttccaccttgaagtgctcagactgaatatgtaatggatgacataatgaaatgccaaggaaaactataaccaggaaggttttttatttaaattagaaacaatcttattttacatatcaatcccagttccctcctcctcccattctcccatgtcccccaccaactccctaatctatcctcaccagggagggtgagtccttgccaggatgttttttatttaaatacatcattttatttttaaatgtacttgaacacttgtttataaatttcctattgtacacatccaaatcttccatcaacatcttactaaccctctatttgctttccaaaaatgtttctccttctattaaaccacagtgagagccctgatatctaattacatatttacaagtactggctatatccactgataatgaagatgaaatgtgtgtgagtgagcagtttattccacattcaaacaaggagcaccacaatgcagaatcgctgtgctcagagcagcagtgctggaagtggagacatagcgtgacttgccccctcccttaacagccttagagcagctctgaacttccccagccaaggttccagatcttttaaatttccgttttatctctcttctactaacaggaattcattatctacccactaagtaaaagcaaataattacacaaaataaacagggaggtaattaattagtgtaataaacattaagcgattgttgtaatgtactaaaataacaagggatgcctgtctgtgccttgtgtttttcttcctaaggcaggagggaaatgttcttgcagccacagtgagctgccttttctgggattaaactgagcttcttacagtagagaaattgtgctttgttcttattttcattcccgactaagtggatggaaatttcatctttgtaatagagaaagactacttggaatgaagtgaaatttgaaaaaaataaataaataaacaagaacactaaccaaaaaaaaaaactggattttaatgataatgacctttactcttctctagtctaatttagttttatgatatttctctatagaccagctggttggagataggatttcccaagacccttcaagtgctgagaaatgaagtttaaagtctgagtctatcttaaagaaacaagggatagggattaacaggccaacaggaagggaagagagaaaatctggtaagtgatggtgcagagtgctgagagtcacaatctgatttgtggcacttgcagaaggaagaatgtctctgaaccaggacatcccagaccctggctgaactgaagtctttttttttttttaaacagaagtctcctgctttatctcatttcaatgcagtatggtgaatttcaggaaggaaggcatatttcatttatccatatcaactatgttaaattcactaagcttattatcttacactagactgctttcccatcacatatgtgagaatgctaaaagtcattttgactcctatagcatgaataataaaaacccagagacagaaattgaggttcaaggtgaagatcagagaagcaaagcagccacactatctgagagttcctacctctgtcaaggcttaaaggggcatcatgtcagaaacatggctggagacttactgcccaagactgaatactaaatgccctgcatctatcatatatacttctctaatgttgggattaaaggcatgaaatctgttattcttttagattgattcactttcatgtagccctgagtggccttgaactcacaaaactctgtttgcctgtgtctcttgaatcttgggtttaaaggtatgtgccattgctgcccagcttctatggttgtggctaattttatattctgatcttcagtggctttattagatcataaactatatatcaccacagacttcccagccaggactagataacaatgtttatagacagcaatatagctcaaagctgtaacagtgaaattaggttctagcttcaatgacccattagtatagtgcttctcaacctgtggatcatgacccctttgggggtctttatcagatatcccctacatgtagatatttactttatgactcataacaatagtaaaattacaattataaaataacaataaaataattacacaattgggggtcaccagaacatgaggaactgtattaaagggttgcagcattaggaaggttgacagccactgctttatttgatcttgtttctatccaaatatcatcaattttattcaatggtgataatccccactcttttaaatctagcagaaaggaatatgaaattgggaggaaannnnnnnnnnnnnnnnnnnnnnnnnnnnnnnnnnnnnnnnnnnnnnnnnnnnggtaaattgaatgggaagaggtggagtggatttgatcaatatattatttacatgtataaaattgtcaaaaaataaagaataaatgtattttttcttgagaagaaaagcaatatgtaagatactgggtattaaaatccctgatataccatggatatgtttaataaatttattcagaacgagagagagagagagaaattctgcttaataacactagtttggggatggtcttatgtatcccaggctggtcacaaactcactatgcactcaaagataaccttgaactctagatcctcttgcccctaaatcttccaactgctcaagttccaggcagaaacacattgccacatctagcttcaaataaaacgattcccttgcagtgacatctcttcaggtttctaatacaagctattgaacacatcccaagtgtacaggggaaaaaactaacaatacatttaacatgggagaaaaaccaatgatttgtaaagagtccaatgaaattgtcaaatttaataagtatccatggaaatggatgggtttgagaaaggttccttgattctgttgaataaacacagaacagtctgggaataactgtaaatagatacaatttcttttttattcctctgtgagacttctcaaagaccacaaacatatttgataaagggttctcttgtacctgtggcagtgaacagatgaatgctgaacatcaacagtaaaaatgtgacaaatataatgacacactgtaagatcacagtgacatgcacaataaagtatcagaaataaagaaaaaatgccctgacaagatgtcaagtgcagacactttcttatcaaaagagacaacaaaacacaattacagttcacagttcaggaaaaaaatatggatgacaaagaacagaaaggtctggtaacgaaacagtgatttcaaactaaatgtaacagaaaacaagacttctttgtctttggctggaagtgacagggacaaaaatggcatactcttggaaaaagaaatataattgattgcacaggtacaagagaaactgtgttatcaagtaggcagtgacaggggttatggcaggggggccctcatcaatgaagaacatagggctgctttgacacatgaggccaagtgattcccatgtgcagctttcannnnnnnnnnnnnnnnnnnnnnnnnnnnnnnnnnnnnnnnnnnnnnnnnnnnnnnnnnnnnnnnnnnnnnnnnaatccccttcaatgggctgccatatattgctttattaatgtcagatgcacactgtgagtaattcagtgtcataggtaattccaacattccctgtgagcccaaagatggtagaacttcctggcagtcatagaattacatagaagaaaaacaacagttcttattctttgacacattttaggaaataaatacaggtattgttatcataagtataaatacattctataatattagactactgaaatttgaacatgatgtaacacatacacatatcattcctatatcaaaaattctagcatgctgaaatacatggatcacaagttatattaataacatatgcatacaaatattttaagatagatagatagatagatagatagatagatagatagatagatgtgagaataaggggttaaagtcaagggatttcttccaatgagttaaaatttcttgaccatatttctaattgtataggtaacagttgtatcaatagtaaaataaacaccatcaggttagtataaacaacattagaataaaatgtcaatcattgaaaggggttttgctctgctggaaaatatattgtgtgtcttacagttagatactttatttaacaaaatttagcatccatatccccactccattatggttaacatagtttgaactggagagaaataaaaaaacatacagagaattttgtagcagtgttaataggatcttaaatggaaaatgaaagcctttagttatgaaaacttgaaacttaatactctcatttaaaagataaccataatcaccactaagaggcagcccaaatatatgggacctgtgtctccctttacctctgttctgcaataatctctgtcaataaggaccctggttctagaacatctgaatcaaaaatgatgcatttttgctcctgaatgatggtaaatctttggtccattatcaaaataaatcccattttccttaaagctaatcagcaaaactttacctggagagaaagattggaatagtttctgactattcttcccaggcctcctctctttcctgtggtgtgtttcatgctgctgtctccagtgcttcaactgctaaatcccatttcatcctggatcctaatattccccaaggcacagaaactgcagagacacttttccttttcagtacgcacaaaagtcctctgatacctttacaccacttgaggtaagatttggaggacactggggccatggcggcggtacaatcagagagtgcttgtcatataatcatgaagacctatctttggatctctgacactcgtagaaacatcagtgtgtaagggcatgtatctataatcctagtgctatggaagtacaatctggaggaactccagggctggctagtcaactagtccttccaagtctgagcagtggggtcagtgagaaatcctatctcaaaacataaggtagaaagcaacctagatgtccctcaactgaagaattgataaagaaaatctggtacatttacacaacggagtactactcagtggaaagaaatggaatcttgaaatttgcaagcaaatggatggaactagaagacaccatcctgagtgaggtaactcactcagaaagacaaacatagtatttactcactcatatatggatattagacatagagcaaaggatgaccagcttataatctacacctccggagaagctaggaaacaaggagcaccaaagagagccatgcatggtctcccagagaaggggaaagggacgagatctcctgagccaattgggagcatgggggaagaggagagggagttaggagaaatataagggagaagaggagggggtagagaaggacatgggggcaggaagattgagtcagggagggagggaaatagaggaaagcaagaaaagagataccataatagagggagccattatagggttaaaggaaatctggcactagggaaatgtccagagacctacaaggatgacaccaattaacaatctaagcaatagtggagaggctaccttaaatgaccttctccaacaaatgagattgttgactaccttatatgccaccctaaaaccttcatccagtatctgatggaaacagaagcaggcacccacagctaagcagtgagcctaactcctggaatccagtttcagagaaggaggagtgatgagcaaaggggtcaagaccagctggggaaacccacaaaagcagctgacttgaacaagggggatctcatggaccctagactgatagctgggaaaccaacataggaatgaaccaggccccttggacaggggtgtcagtttggaggcctggaagctctatggggcctctgatagtggatcagtatctatccctattgtacaaatggactttgggagtccattccccatagagggatactctctcggcctatacacatgggggagggcctaagccctgtgacaaataatgtgaaaggctctgatgatcccccatgaaagcagaaaggggatgggatgggggtcagtggggggcatgggaggatgggatggagagagacccaggattaatatgtaaaataagattgtttctaatctaaataaaaaataaagcaatagagaaatacactttacaccaacctctggcctccatagactcatacacaaatccaccagcatccatataatacacacagtttagagcagactgacaagtgaagtcagttgactccttacctgacagaatgattgttgcgagaccctgttggtcagatggtacagtctactatggcctggcagctttgtcaaagctcagcaacatgaagtactctctccccaccaaggctgcctcttctctacctgccattatttggaggatgtctctaggcccagatgcctgacttatctcaaggatgacccttgacatcgttccctgcaaatgttcttcccctgatgaccacatgataactaagtaacatgctctaactagttttataagaccatgttgccctaacccagttttatgataggagcatgctgtttaatgtaaattaggtgattccccagctaccattcccaaacctatatattccatatactctgaaacaaagttgatttgtctcactgaagtcatatcccagagggttatcttcattgtatccacagccatcaaaaccctgttccccacttctgctcccttcatctccatggactggtggccaatgagcccaaggaagaaagagatccacaaatgatattgtggttaagattacaatctgtgaaagtagcccttctccattcaaatcctgctcaacttctgatattgatgtgacaatagtttgacttttgttacataacacctacctcttgggctacatttcttcttcaatgaatagagataataatagtttctatttcagacacattaagtgataaaaaaaatgcccagtggctggtccagtacagacactttgtttaaaaagtgacaggaagtcatatgtaactttttcttactgtctctaaagagtttgaactaaggttttaaaagccaaaaatcttatcatggattgtctataaatgataagcaaaaaataatggcctatgagttcaaatagactaagcaacaataagtaggggaaagtaaagatgctataggatgcacaggggaatttaagccaacatttcttcaggcagattatatccaaatatgtggcaagggaaaggatgtttccctgacaaacctcatgagggaaccatcagggaaatatttagcatctgatacatgcttaattctctataaggacgactagcctattgtgtcctgttcttgtacaacctgaatggttagtgactgttctttataataccttttaaatagttttcccagaaacatacattaatttatggtttgtttctatgattagtgaatgttaatctgggtattccattgttgtaacaaatcacacccatataaattcatcgttatgttagccacatatggctttaatttacctctctgtccttctgaccctatatatttgacccatatcatgctctcttttacctgagattatgtttcaatccataaaaactgaacacttacctaaagaggccagtttggatgctaagattctggtgcaattactgatacatctacctgtgcctgtgtccacaagaccttcaatgacaatgtcatttatttgtatttttaattttggttgttgttcatttataaaagtttatcaaaatgcttgcttttcagtttctccttaatttttgttaactcttcgttagctgttctatcatccagagaagtatggtttcttacaacaggcaatagattctttaatttttctgggaaggagtttcctcaacaataacaggaaacaactgaactgaatttggcatggaggcctgcaagaggtccctcaaggcatttccctatgacaaagaattaccttgactgccccttgttgatctacattcatttgtcctatgcatgcccttgccacaccttctgcagaatcgagaagggagaggaataattttagttttacttagaaaaaaaaaacattatttataggaatgccttgttcacaatccctttttagatgacttgtttggcacaattaaaacagttgacactttgatttttttcctttaaacccatggaaattacctctatcaaagcatcaccatggtcatgagattcaatatttattgtatctcatacccattgctccaagagttctgatcttgccttcaatagcctcattaccattttgcattgtttataggcattttcaaaagacagagattcaattataatttgtttatcttctgaaattcacttggcaggtgttcctgtaaggtaactgagtaaattaaagttggttgtttgaaaaccttaggctattcctctctaaccttataatacagtgctgatgttggttctcctttaaattcctgtgtctgggtttgaatatctctataatctgttttattaggtattccaaaatcttgtatcttagcactcatattaacaaacttttaataataaaactgatgtttataattgacattacataaagcccatctaaattagctatcttctcatttaattgatccattttcaaactgtccagcgtattatcatacagatatctaaccccctccattgtaatgtggaaaatctctctctctctctctctctctctctctctctctctctctctctctctctctgagtgtgtgtgtgtgtgtgtgtgtgtgtgtgtgtgtcctaattttcccctttaagaattcccaattgtcttaccaaatctactgatgatgacagcagaacataaggctgcaaagcatgcctgatcagagaatacagatgccacacagactagctgaggacagctacagctgctagtgtgtagctgtgagctgagagtgtgtggcagttgcacaaacagtagaagcctgagtgggtatcaatgcagatacttagtagcagcagcctgaggagggagttcaggagaagtccacaacccacaggggagagggaggaagtggttttaaaaactcacaagggatcatgcagaagaagcatggctgctgcagagggactgcaacaaaaaaagttccaaactcatttagaggcttaaggaaaaaagagaggtgaacctagcctgctaagtggtgaccccaggaggagttctacatgcagctctggtctgttccagtggttgcaaagccacaggcaagtggctttttcatgaatttgtaccccaaaagttgggtgccagatgtaacaagagttctaattagtcttagtaataacaaacctggagtcagatactgggataaatgctgaaagatcagagagacaaaagaacaagacacagccacctcttacctagccaacttctcagccaaaaagagactgagttcctgtatccttcagctttatattcctcactccacccaggcatatcactacctgtctgtctgtacagacctccagacctctgtggttagctagtgtatagctctgccctctgatcttcaggaaagctttatttgttagagtacaaataagatatcaccaaagtgaagagcctgatttcctctctgcacttgcttacctgggaagagcctactgcacccctctgtctctcttttctctctcttactgagcactctgttacaaagacttctctccaaagtcttaatcccaaaagtcactgaaatggaatgcaaataattgttgcagttagttttaactgtcaatttgacacaacctagaaatatgtgggaagggagtcttcatgaaatttagagcaacttggcttgtgggcatgtctgggtgatagtggtggtcctgactggtaattgattaggaaaacacagccaatatgtaggtggtaccttctggtagcctctcagaaacaggaatgcttacctgttttcctcacctggatttcatgcttgctggtcaatccttccactgtattgcttctgctgcaattccttctcttacacgagaaccgtattcttcaggattccaacatggactaaaggccagtgaccctcaaagaatcccccatgccttcagtgccagattgggactgctaagaactcaagtctcttggactgagcaattgtgggtgagatctcagtctcttgactgtgagacagtcattactgaaagactctggtcatttcctgtaagccagtttacatactctctttaatgtatattcactctcagctctgttccactggagaactctgacaaagagagaagagaccttacatcgaagctagtggcaaacactacagaatgtgaaaaataaaactagaagctacataacttgcaagagggtggtttgaaatccctacttactgtacagatacacaagcataaaaggtgacaatttcaatgaacattgttctcaaatacaaggtcctgtgctaactacttctccaaaagctttggtttctaactcacaattatggcccttacagaaggaagtttcagacctcaagatcacctttagactggagctcagatccaaagtgtataggtttaaaaatttagagggcagctaagacaaacagggagaaaagataaattttccagaactctcctttgtctttagggtattttaatcaaatgagaaagccacagacggtcacactatttctttgtacataaatagcaatgtagctaggtcatatcttccacattccatctgccagatgcaaggtgggggagcagagcagttaagcatgtcattaatcatggctgagagtggcaggatcaagcacactatgattcatgataaatagagaagcatctagataatgtgctttgtttctttcccttaagtgaaaacaagatgaagaatctaaagtgatgtttgtagacctgtgctagtgtctgaggtagaatgggtgaccatttgattgaagaaatcatctaatttatcagaataattgcctttacacaccctgtgggggtggggggagaggaagggaggaaaagatatataactatttgctttgttttctttctgtggtatttccatctacactgtcacccctatcatgctcagaatgaaacatcttagcttaaattaaacgctgaaaggaaaatacttgagaaaaatgctgtttggggaggggttgttattgttgttttatttttcttactaccagattattaagactagactgacaggaagatggttctcctttgtgtcttactattgctgctttgtgcttttaaaacagctattccttggctcacaccaccatgtgactagtgagtaaaggacagattagatcccaattttcctgtcttaagtcaagcatggaagctgcttcctttatgtgattcaagggagtgtgagtagtattacactattttaaaatctgtccaattaaaggagactatctactcttattgtacagattcacaaaacatactacatatgtgtgtgtgtgatgtgtatgtgcagacacacatgcccatgaatacccctgtggatggtagagtaggatataggtatcttcctctatgacagggtatctcactgatacatgtttaggttaggctggattgacagagagcttctaggatccaactatctctgcctgtacctcatgccctgaccatgatgtgcttttatgtgaatactggagaattgaacttagttcctcttccttccatggcaactactcttccccactgagccatctccttggcacagtagtattatgaaacaaaaccaatgaaattggtttaattacttcacaatggctaccattaagaatacaaagagatacagacttagaaccacaaggggacaagaacatgggaagcaggtttcagaagctaatcacaaatactgtgaaatgctccccaaagtcatggattccttacacatatactatacttctctttttattcatgagttcagccacctggactacctttcagctcctgcaagcttccaaccccaaatccttttagacttcatgcatgttgttctttttttcttatttttttattagttctagttagggaacaagcttgtttcaagtcccctctccctctccctcccctcacccccaaacttcctctcccacccccagtccaccccccacnnnnnnnnnnnnnnnnnnnnnnnnnnnnnnnnnnnnnnnnnnnnnnnnnnnnnnnnnnnnnnnnnnnnnnnnnnnnnnnnnnnnnnnnnnnnnnnnnnnnnnnnnnnnnnnnnnnnnnnnnnnnnnnnnnnnnnnnnnnnnnnnnnnnnnnnnnnnnnnnnnnnnnnnnnnnnnnnnnnnnnnnnnnnnnnnnnnnnnnnnnnnnnnnnnnnnnnnnnnnnnnnnnnnnnnnnnnnnnnnnnccattcctggggaccatttatcccttagagtccttcatgtttcctagtttctttggtgaagggcattatagactggtaatgctttgctctatgtctaaaattcatatgtcagtgagtacatagcatgtttgtctttttgtgactgggttacctcactcaggatggtttcctctagttctatccatttgcctgcgaatttcaagattccattgcttttttctgctgagtagtactccattgtatagatgtaccacattttctctttccattcttcagttgaggggcatctaggttgcttccaggttctggctattacaaacaatgctgctatgaacatggttgaacatatgtccttgttgtatgtacatgcactatttgggtatatacccaagagaggaatggctggatcttgaggtagactgattcccatttttctgagcaaccgccatactgatttccagagtggtcttacaagttcgcactcccaccacttatggaggagtgttcctttttctccacatcctctccagcatagattgtcattggtattttttattttagccattctgacaggtgtgagttggtatctcagagttgttttgagttgcatttctctgatggccaatgattttgaccactttcttaagtgtctttcagccatttcggattcctctgttgagaattccctatttagttctgcaccccactttttaatttcattgtttggtgttttggtggctagcttcttgagcgtcttatatattttggaaatcagtcctctgtcagatgtgggatcggtgaagatcttttcccattctgtgggtggtcgtgttgtcctactgcatgttgttctttactccaaaatgatatcaaacatcctcgttcatctcttcacttagccaattcccgagattctctaagacttaaagatttctcttcaaagaagccttttttactcccataaattaagattaattttgtttttcagtctcctaattccttctgcatctcctttagattgtttatagaaactacaatcaaagtgtaggtaaatttataattgtgtttcacagaattaaattatagtaaaacaaacacaattgcttttggtttattttggataacacatcctccagcacatagaaatgtccatcaggaaagggtgattttcctccttattaaacccagaggtggcccaaatgccagagacatggaatatgtggagggtgggttaaacaccaacttcaaactttcattcaagtttgctttttgatttcctaaaattttcaaggaaaataaatggaaaagtgaagctcaattgtaagggcaaaaattaatctgtgagccccacttgtccaaggacagagaacttcctgggaagctgcaaactattgttcatgtaagataaagtcatgtgttttcacttcagtaaacaagcttggttgcccaaactgagcagaatgtgcttaatcacatgtatgcaggagatacatagtcaggaagtacatcttgatgtatgtttgccccctgtaggataaaggttggaagtagaacagccttgttgaggtttgcatttatgagcacctacctgactggctgaattcattgacagttctctgggaatcctgggtgtggattcctggctcatgttaaataaaacttgcttcagttggacagtcctggattcagtcttttctcctcacaattttcaggattaacataatcacaaaatttctgaagaaaaaaaaaagcaaaagtcttctcagaaaatagccatcaggttagacagaaatccaggattctagtacagagacagcagccttacacagggcagcttcctctgcatcattttcacccccaggctctgcctgtgagatgagtattcaatgacaaaattttacatagatgtagggactgtgtgggggagctaaactgtgcttaggcactggtgaccaacatcacaaacacagaagcagacagaatgcctctgccctggcaaaaccaactgttaattcacagctgatggtagacaagttaattctgaagccaaattctgaagccttggcccaagaacacaaattcagtttacagaaatactatgttccaatgtggtaagagtttaattgagtttttaaagcagcagaaaaactaaaatcataatttcagataatttttatagacataggtggaaaggtcaggctgccagattacagaaaggcagaaaaatctcatctatggtctcagagatttcacgaccacagagttagctattggttcctgggttctggctgcctgtctgtacatcccaatgacttacctggtagtcaaaatgatgacatcatgccacagataagagtgagcaatgcatggctagtaatgggactaaaatatggcctaagataacccagctcaggacctgcaatattccaacctctccacatcattgaagttctaatccatcaataatgttcacgtgagcttaatactctgggtatgttatttggctttcctgtatttcaattgtatcatcagtaaaatgggtataaaagtgtcagctaagtgttctatgtttagctgtatgcctgtgaatttgtgtatgcatttcagtcttattggtgttatttattttatgaaactctaacaggaagtatcagggaaaagtaatcagagaaactaaataaaagatgaattagggagaaaaagaattctaaagatagaaggggtcataactgagtagcctatgaatagatttttaaatacatttttattatttatttgtttgtatatatgtgcatgacagaaagggtattaaatacctggagctggaattacaggcagctatgaaccaaaatgcatgctagctatgaattgaactgcagtgcttgggtagagcattaagtgcccttgcccagagagacatcttaacacatatgaagacattatagtctagtaaaaacaatccttaaacatcaaaaggccaaggaaggggaggagggtgcatgtgaaggaaggggtcattgtttcagtgtgtgccatagaatgaaggcagcggtgagcagtgggtgctgagggccttcgggctgatgccaaagactctgattttcaagctaaattaggagctatagtggcttcctgggcagagcacaatcttattaaaataatttaggaaagggtaatcatcgttttaactggggtggattagaaacaataataacctgcctggctaaggtttgagtctgcctcaggattaaaaagaaagctggaaattaaggggtatttagataacagatggggaacataggtgtaaacagaattgctccaggattcccagggcatagcagcagagaaggcctagccctagaggaagacacaaggtatattgtcacaatacttcagagtacaaaggcacacatcattaatagttaatgcatttcacagttcaattctggtattttattggagaagaaaaccctcaggccaagataagttcataacaggacattcacgtctctccacacccttgagggttttttccccaaacattggtccactaacctgcaaaaagaagccacaaatcaggcctactagacatggctactcctttgaaggttttaccagtatgagctcagctgactcacccaattcatttcacacaactaccaaataccagtcaatcttctgtcatttgaaaaccaagaacttaaaagttaaaagaaccctatcatgagactggcaccttaatctcactcacatctggttctcagactgacattatcaagaaattaatgattctccactcactgatatgtttgtgtctgcaaacactgcatttgaaatcatccctggtcttcattggttatttttcaattatttagtgacctatatccataaaaatactgcactcattttgaatatgtcatctatataatgggtataaatctatcttctgaatgataaattttatctgaatacctctaagactagaaggtcaacagaatcttgccttgagtgccaggacttgcacaacctgattcaggttcctgtcttttcatctattacttgttgctactaagtaaaaataactattgtgctgggcattggtggctcacacctttaatcccagcactcgggaggcagaggcaggtggatctctgtgagttcgagaccagcctggtatacaagagctagttccagaacagcctccaaagccacagagaaccctgtctcgaaaaaccaaaaaataaataaataaataaataaataaataaataaataaataaatattgtttttctcaactgaaaaaaatgggattaagatggctaaggaaactactttggagtgtcaaatgtcagacagaatctgcctttggagctttgggcattttcacctcactacctcttccctgctcttctcattcagtctacttccaacttgaccacgcagtctcagtgacagatgagtagtagaggccatcagccaatacccattcagaatccacatgattaaagcagcagcaaacagtcaatgaggcagagatgggccatcttcttcacctagacagattgcaaattgtcctttctatggatcgtatggcatcttcactgtttgacagtcccagtgtttacataacacagagataaaaacaacacagccaatcatcctaaagcttacaacttaatagtatcagaaatgtctaaatagtaaatcttgaatgaatgaaggtgaaatgactatttgggagatcaaaaatgttttctaatgccttaatggaagtttagcatttgataaagcaagaagaaaggtaaaggtattttcaataggtgggttaaacagtagaaacagcaaccttagagggacagagaaatccattggggtgtgtgtgtgtgtgtgtgtgtgtgtgtgtgtgtgtgtgtgtgtgtggtgtgtgtgtgtgtgtgtgtgtgtgtgtgtgtgtgtgtgtgtgagagagagagagagagagagagagagagagagagagcatgaatgtacatgcacacatgttgtcatctggaaataactaatttaaagcattttactttactttttcatcattttactttccttcaggaaggcactgtcttttgtagataatacaaaacaggataagtcgtacaagacactgacacaaggactatattaatatcttcactatcattgctatcattagcaaaactagcagtcatatgtcaagtgctggtgaaaccccaggtacgttggcaggcacttggtttgcattacccatccatctcttaaatgggaaatcttttgacaataatggcagttatgcctcagagagtttaaccctgagtcagatgcccacttaaggcaagaggaacaatgtctacatttgtctgtctttataaatcttttccactaccctgtgttcaggctgaagaaggatgggtagaagcgggtaagtttgagctcagagacatcgtaattcactgatgagaagaggcatggtcaattttcccacatctccataacaattatgaaggaaacatctaactccccttactgcagctccatgctcatttctgggatttcctgcatgttgcagaacatgcagtccttggagaaagaggatcaatattaagacttttaatattttgctgcctgttagcatctaaagagctcaaactaatgaactcatatcacactgcttttattaaccacatcatttctgcatctgcaagaagacataagccaggagacagctggaagtgaggtgaagtcaatgatactgatgccactgactttgcaacccaagggaagcaaactgtggcttgtttggctgattactcacaggaaaaacctccaggctgaaaatgaaagcaggatcatcaccggcacaactcctaaagaatgtctgtattttctgtaagatgaccgtgtggctcacagctctttgtccgtgaaactatatattaacatgtttaagaaaatgagagggggcttagccatggagactctggtggtgttcagaaggaaatgaccacatcccagctacttattactgtgcagatcttgagaaattaatttgtttttctgatttaaacaccactggccttagctcataaacattaaatgaagggacagaagttaattttccaaaggtctcttcagttccaatcttgttacagctattgtgctagaaattgcttttgtagaaaaatgagtaacaaatccaatggtccatttattcaaactatgagaaatctaaaatacctgcaagacaagacatgtatcatgaattaatgttttggaatgtacaagataaaacaaggaataattgggccccttcagatactcaccactgtgtttttaagagacatttatttatttatttatttagcctccaatgttctttacatccactatgttcataatttcttttctgaagaaaaaatgactgataacatttatttgttcatttatccaaaacaaagactaaacagatgtcagtcacacagcttaatgcctgaggaaactgtttacacccccaccccaaaagaatacagggtatgttagaatcactgtccggaatctgagaaaattccctcaattagaaatgccgagacttcaccggggaaaactgctgtgaaaaagaaattcataacatgtcattttcacagcttaatccctgaggaaactttttatatccccactcccaaagagtggcagggtgtgttagcatctgtcaagagaaccctggccaaatgagtcagcttaatgctgtcactccttagcaacaattgataggatgaaaggatagatcagggaagctgcactccgtgggtaatgggaaggaagtgatagctgcagaacccttatcctggagcttttaaccaagcagataccacagttgtggctgtgatgactgaggttgactagtgagaacaattgtagtaagttctcagaatagcagaaatggagtgacaggacttacccaccaggaacaagatgagcatgtgtgccataagggttgccataccagtaaccaaaatgattgattgatcatcaggaatcacatcaattactaatttctctcaatatccccaggacttcaacagatgggaaacctataaagacacccattataccacgtaacaagaaaaaaaaaaaaacatcgtatatatttattccattgtatatctgtagcctctttgtcaaaaatcaggtgtccgtagttatgtgggttaatatcagggttttcaattcaattccattggtctacctgcctatttttgtgccaataccaagctgttttcaggattatatctctataatagagcttgaagtcagggatggtgatgcctccagaagttcctttattgtacagggttgttgtggctatcctgagtcttttgtttttccatataaagttgagaattgttcttttaaggtctgtgaagaattgtgctggggttttgatggggattacattgaatctgtagattgctttgggcaagactgccattttcactatgttgatcctacctatccaaaagcatggaagacctttccattttctagtatcttctttaatttctttctttaaagacttagagttcttgctatacaggtctttcacttgtttggttagtgttaccccaagatattttatgttgtttgtggctattttaaagggtgatgtttctatgatttctttctcagccctcttatcatctgtatatagtagggcttctgacttttttgagttaattttgtatcctgctactttgctgaaggtgtttatcagctgtaggagttccctggttgttttttcaggtcacttatgcaatctatcatatcatctgcaaacagtgaaagattgacttcttcctttccaatttgtatccttttgttgtcttattgctctagctagaacttcaagtacaatattgaagagatatggagagagtggacagccttgtcttgttcctgaggaggactctaagagagacatacatggtcccccagagaaggggaaaggtacaagatctcctgagcaaattaggagcatgggggagggaagagggagctaggagaatgagaagggcagaagagggggaatgaggaggacataaaggagcaggaaggttgtgtagagggaagaatagagaagaacaaaataagaggtaccatcagagatggagccagtataggtttaaagagaaatcaggcactcggaaaatgtccagagatctagaaggatgacaccaactaaccatctaagcaacagtggagaggctaccttaaataacctcccctgataatgagattgatgactaacttatatgccatcctagagccttcacccagcagctgaaggaagttgaggcagataccaacagctaaacactgaactgaactgggttccagttgcagagaaggagaaatgatgagcaaagtgnnnnnnnnnnnnnnnnnnnnnnnnnnnnnnnnnnnnnnnnnnnnnnnnnnnnnnnnnnnnnnnnnnnnnnnnnnnnnnnnnnnnnnnnnnnnnnnnnnnnnnnnnnnnnnnnnnnnnnnnnnnnnnnnnnnnnnnnnnnnnnnnnnnnnnnnnnnnnnnnnnnnnnnnnnnnnnnnnnnnnnnnnnnnnnnnnnnnnnnnnnnnnnnnnnnnnnnnnnnnnnnnnnnnnnnnnnnnnnnnnnnnnnnnnnnnnnnnnnnnnnnnnnnnnnnnnnnnnnnnnnnnnnnnnnnnnnnnnnnnnnnnnnnnnnnnnnnnnnnnnnnnnnnnnnnnnnnnnnnnnnnnnnnnnnnnnnnnnnnnnnnnnnnnnnnnnnnnnnnnnnnnnnnnnnnnnnnnnnnnnnnnnnnnnnnnnnnnnnnnnnnnnnnnnnnnnnnnnnnnnnnnnnnnnnnnnnnnnnnnnnnnnnnnnnnnnnnnnnnnnnnnnnnnnnnnnnnnnnnnnnnnnnnnnnnnnnnnnnnnnnnnnnnnnnnnnnnnnnnnnnnnnnnnnnnnnnnnnnnnnnnnnnnnnnnnnnnnnnnnnnnnnnnnnnnnnnnnnnnnnnnnnnnnnnnnnnnnnnnnnnnnnnnnnnnnnnnnnnnnnnnnnnnnnnnnnnnnnnnnnnnnnnnnnnnnnnnnnnnnnnnnnnnnnnnnnnnnnnnnnnnnnnnnnnnnnnnnnnnnnnnnnnnnnnnnnnnnnnnnnnnnnnnnnnnnnnnnnnnnnnnnnnnnnnnnnnnnnnnnnnnnnnnnnnnnnnnnnnnnnnnnnnnnnnnnnnnnnnnnnnnnnnnnnnnnnnnnnnnnnnnnnnnnnnnnnnnnnnnnnnnnnnnnnnnnnnnnnnnnnnnnnnnnnnnnnnnnnnnnnnnnnnnnnnnnnnnnnnnnnnnnnnnnnnnnnnnnnnnnnnnnnnnnnnnnnnnnnnnnnnnnnnnnnnnnnnnnnnnnnnnnnnnnnnnnnnnnnnnnnnnnnnnnnnnnnnnnnnnnnnnnnnnnnnnnnnnnnnnnnnnnnnnnnnnnnnnnnnnnnnnnnnnnnnnnnnnnnnnnnnnnnnnnnnnnnnnnnnnnnnnnnnnnnnnnnnnnnnnnnnnnnnnnnnnnnnnnnnnnnnnnnnnnnnnnnnnnnnnnnnnnnnnnnnnnnnnnnnnnnnnnnnnnnnnnnnnnnnnnnnnnnnnnnnnnnnnnnnnnnnnnnnnnnnnnnnnnnnnnnnnnnnnnnnnnnnnnnnnnnnnnnnnnnnnnnnnnnnnnnnnnnnnnnnnnnnnnnnnnnnnnnnnnnnnnnnnnnnnnnnnnnnnnnnnnnnnnnnnnnnnnnnnnnnnnnnnnnnnnnnnnnnnnnnnnnnnnnnnnnnnnnnnnnnnnnnnnnnnnnnnnnnnnnnnnnnnnnnnnnnnnnnnnnnnnnnnnnnnnnnnnnnnnnnnnnnnnnnnnnnnnnnnnnnnnnnnnnnnnnnnnnnnnnnnnnnnnnnnnnnnnnnnnnnnnnnnnnnnnnnnnnnnnnnnnnnnnnnnnnnnnnnnnnnnnnnnnnnnnnnnnnnnnnnnnnnnnnnnnnnnnnnnnnnnnnnnnnnnnnnnnnnnnnnnnnnnnnnnnnnnnnnnnnnnnnnnnnnnnnnnnnnnnnnnnnnnnnnnnnnnnnnnnnnnnnnnnnnnnnnnnnnnnnnnnnnnnnnnnnnnnnnnnnnnnnnnnnnnnnnnnnnnnnnnnnnnnnnnnnnnnnnnnnnnnnnnnnnnnnnnnnnnnnnnnnnnnnnnnnnnnnnnnnnnnnnnnnnnnnnnnnnnnnnnnnnnnnnnnnnnnnnnnnnnnnnnnnnnnnnnnnnnnnnnnnnnnnnnnnnnnnnnnnnnnnnnnnnnnnnnnnnnnnnnnnnnnnnnnnnnnnnnnnnnnnnnnnnnnnnnnnnnnnnnnnnnnnnnnnnnnnnnnnnnnnnnnnnnnnnnnnnnnnnnnnnnnnnnnnnnnnnnnnnnnnnnnnnnnnnnnnnnnnnnnnnnnnnnnnnnnnnnnnnnnnnnnnnnnnnnnnnnnnnnnnnnnnnnnnnnnnnnnnnnnnnnnnnnnnnnnnnnnnnnnnnnnnnnnnnnnnnnnnnnnnnnnnnnnnnnnnnnnnnnnnnnnnnnnnnnnnnnnnnnnnnnnnnnnnnnnnnnnnnnnnnnnnnnnnnnnnnnnnnnnnnnnnnnnnnnnnnnnnnnnnnnnnnnnnnnnnnnnnnnnnnnnnnnnnnnnnnnnnnnnnnnnnnnnnnnnnnnnnnnnnnnnnnnnnnnnnnnnnnnnnnnnnnnnnnnnnnnnnnnnnnnnnnnnnnnnnnnnnnnnnnnnnnnnnnnnnnnnnnnnnnnnnnnnnnnnnnnnnnnnnnnnnnnnnnnnnnnnnnnnnnnnnnnnnnnnnnnnnnnnnnnnnnnnnnnnnnnnnnnnnnnnnnnnnnnnnnnnnnnnnnnnnnnnnnnnnnnnnnnnnnnnnnnnnnnnnnnnnnnnnnnnnnnnnnnnnnnnnnnnnnnnnnnnnnnnnnnnnnnnnnnnnnnnnnnnnnnnnnnnnnnnnnnnnnnnnnnnnnnnnnnnnnnnnnnnnnnnnnnnnnnnnnnnnnnnnnnnnnnnnnnnnnnnnnnnnnnnnnnnnnnnnnnnnnnnnnnnnnnnnnnnnnnnnnnnnnnnnnnnnnnnnnnnnnnnnnnnnnnnnnnnnnnnnnnnnnnnnnnnnnnnnnnnnnnnnnnnnnnnnnnnnnnnnnnnnnnnnnnnnnnnnnnnnnnnnnnnnnnnnnnnnnnnnnnnnnnnnnnnnnnnnnnnnnnnnnnnnnnnnnnnnnnnnnnnnnnnnnnnnnnnnnnnnnnnnnnnnnnnnnnnnnnnnnnnnnnnnnnnnnnnnnnnnnnnnnnnnnnnnnnnnnnnnnnnnnnnnnnnnnnnnnnnnnnnnnnnnnnnnnnnnnnnnnnnnnnnnnnnnnnnnnnnnnnnnnnnnnnnnnnnnnnnnnnnnnnnnnnnnnnnnnnnnnnnnnnnnnnnnnnnnnnnnnnnnnnnnnnnnnnnnnnnnnnnnnnnnnnnnnnnnnnnnnnnnnnnnnnnnnnnnnnnnnnnnnnnnnnnnnnnnnnnnnnnnnnnnnnnnnnnnnnnnnnnnnnnnnnnnnnnnnnnnnnnnnnnnnnnnnnnnnnnnnnnnnnnnnnnnnnnnnnnnnnnnnnnnnnnnnnnnnnnnnnnnnnnnnnnnnnnnnnnnnnnnnnnnnnnnnnnnnnnnnnnnnnnnnnnnnnnnnnnnnnnnnnnnnnnnnnnnnnnnnnnnnnnnnnnnnnnnnnnnnnnnnnnnnnnnnnnnnnnnnnnnnnnnnnnnnnnnnnnnnnnnnnnnnnnnnnnnnnnnnnnnnnnnnnnnnnnnnnnnnnnnnnnnnnnnnnnnnnnnnnnnnnnnnnnnnnnnnnnnnnnnnnnnnnnnnnnnnnnnnnnnnnnnnnnnnnnnnnnnnnnnnnnnnnnnnnnnnnnnnnnnnnnnnnnnnnnnnnnnnnnnnnnnnnnnnnnnnnnnnnnnnnnnnnnnnnnnnnnnnnnnnnnnnnnnnnnnnnnnnnnnnnnnnnnnnnnnnnnnnnnnnnnnnnnnnnnnnnnnnnnnnnnnnnnnnnnnnnnnnnnnnnnattccattggtctacctgcctatttttgtgccaataccaagctgttttcaggattatatctctataatagagcttgaagtcagggatggtgatgcctccagaagttcctttattgtacagggttgttttggctatcctgaggcttttgtttttccatataaagttgagaattgttcttttaaggtctgtgaagaattgtgctggggttttgatggggattacattgaatctgtagattgctttgggcaagactgccattttcactatgttgatcctacctatccaaaagcatggaagacctttccattttctagtatcttctttaatttctttctttaaagacttagagttcttgctatacaggtctttcacttgtttggttagtgttaccccaagatattttatgttgtttgtggctattttaaagggtgatgtttctatgatttctttctcagccctcttatcatctgtatatagtagggcttctgacttttttgagttaattttgtatcctgctactttgctgaaggtgtttatcagctgtaggagttccctggttgttttttcaggtcacttatgcaatctatcatatcatctgcaaacagtgaaagattgacttcttcctttccaatttgtatccttttgttgtcttattgctctagctagaacttcaagtacaatattgaagagatatggagagagtggacagccttgtcttgttcctgaggaggactctaagagagacatacatggtcccccagagaaggggaaaggtacaagatctcctgagcaaattaggagcatgggggagggaagagggagctaggagaatgagaagggcagaagagggggaatgaggaggacataaaggagcaggaaggttgtgtagagggaagaatagagaagaacaaaataagaggtaccatcagagatggagccagtataggtttaaagagaaatcaggcactcggaaaatgtccagagatctagaaggatgacaccaactaaccatctaagcaacagtggagaggctaccttaaataacctcccctgataatgagattgatgactaacttatatgccatcctagagccttcacccagcagctgaaggaagttgaggcagataccaacagctaaacactgaactgaactgggttccagttgcagagaaggagaaatgatgagcaaagtggtcaagaccaggctggtgagacctacagaaacagctgacctgaagaaggggaagctcttggccccaagactgatgactgggaaaccagcatagactaatccagaccccatgaatgtgggtgtcagtgaggaggcctcagaagtctatgggggcctcttgtagtagatcagtacttatcccaacataggaatagactttgggagcccattctacatagagggatactccttcagcctagaaacacgagggagggcctaggccctatcccaaaggatatgacagactctgaagacccccccatggaagacctcactctccctggggagcagaaattgtatgggataaatagggtgttagtgggggcaggggcaggggagggagagagaatgggtattgacatgtaaaataatcttgtttctgatttaaataaacaatgggggggtaaaggaaagatacctaagtctggtgatcaaaacataacttaagccatcacactgtcaaggcatgatgtgccaactgctttttatatacccaatgcaacccagagagcacagattaattaaaattaattgatgtatgtttgccactagtgtatgattatattccttggagcccttgccaaagtatacagtagctgagttactagaatgaatatgaagcaaaaattaagataagaacctgtatttcttgggcatcattagatttactgaactgccattaatgtctggaggtccaaaatgccaatcaaaagtttggatggtatggaaggagtttttacatacatgacaataagttcagtaaatgcatagatctagtgtgtgtgtgtgtgtgtgtgtgtgtgtgtgtgtgagagagagagagagagagagagagagagagagagagagagagggagggagggagggagggagggagttcccaacagtttctgactgcataattaagggagacatttttttaaaaagtagaatgctaatttggttttttggcctatagatacatgtacacagtaagaagagtaactgtaccatcttcaatttgcctatctaccagaatgatggatcaaaagtaatgacagactattgagtgggtgtcagaggtcactgttgataacaaagcattgtaagaaacctgtcacataccatctgaaatcacagtcattaagaaatgggataactgtggacaggaactgtcacaaacttgaccagatggtaaaattaacagtagctgttgctgcagagatgggatcactgagcaaagtggcatagcactgtcacactgtatgttcacaattttcttcaaaaatataagtcttcaaaaatgagccttaattttattttatctgggcaaggcagaaagattccttcttattcaaatgtcttattagaaatgagacagttttcccaccttctgccataatcacacaaacactgcccactttgtcattccacagggaattacattgaacaattatcatgaagattatagctgataaacaaaaatattttagatacttaatgaaatgtacaaaactaaagtcccacaaaactgttaatatagtaggaaaaatcaaatggatgaatttaacaacacagactcactcaaacatgactgcgattgacagcaataaatgaaacaagttcagacagtatatgcaaaggtctcattgaagaggtggctgacacacatctatcaatgacagtttagttggatgcccaccaatttgaaaagtagtgtttagagactagtgacaagaagtcagtgatagacttatgtgtatgagttttctgcaataggcatgcacacaaaacctattttggttgcatgttaagcttcactaaggaaggtttctggcagtccagtgacacagtccagtgggcaaatatacctatatcaaacacacagtattcccagcctcctctttatgaggccagtaagcacaaagttagaagctatccactagttcagtctagcttagctattgctattctgagtgtcctctgacagttttccagtgtgggacacaatggggcagcaggctgagtgattacacaagatcaccagcaagccaactggtagcaggctcattacccaggccctgatccattttgtagggtcagagattcaatgaacataaacaggcacatatatcctgggtatggattatgctctctggacaacaatcacaaagctactgttgcctgtgctatttcacttgatatcatggtgatcactcactgtgatagtttaccaaacagaattccctctaatcaaataaacttctaaaatcaaaagacatacacagatgagctcatctccatggagtcactattgttttctatttacttgatatgtgtgtgtgtgtgtgtgtgtgtgtgtgtgtgtgtgtgtgtgtgtgtgtgtgtagaacctttccccatttctgttactccattatgcatgcactgttggagataacctttaaaatttagtttgtaagaccaatagagatgcccttagcagtcgttagctggactgaatcttcaacagtcatcttactaactctgggcatccatctccttctcagaacaaggactttaggaaacttgtaattgtaaatcctttcttttcccctttgacacataaatctttttaaaagcttcttgtaggttttacaactcagaaaagtgtttcccaaggccctgggtgcaatccctttgaaatgtaatcatgcaagcagatagaactttgtgtcctggtttccatgggannnnnnnnnnnnnnnnnnnnnnnnnnnnnnnnnnnnnnnnagagcctagatcctttaaccccacttgaaatattgcagtagattcctaatagtttttcctcacctctctttaaaattcagcctctcattttctactgtaaagttctcaatagcactatgttgtgaccacattctttttcctctctctaaatagaaaatgctgcaaacaaagggcatctacttatgcaccaatgctctctatttcaggcagggtcaaaaagacacccttgctgaagtgtagtttactggcattggcgcaggctcagtagttgtaactgtagtaaggtctcctgtagcagaacttatggcttccatagcagccagggttgaaaagtttcttgaatttggacttgttttccacaaggctttggtgaagtgttcacggtagtagagatgccaactttgcagacaggatgttcaattttaaaaagttgctgcttggttgaaaacttctgacttgttagctagactcaagtgtctgacagctatcaagcaaacaaacaacaacaaaaaatattcctggtccttgtgaactgaagtttctaggaagaaaaagcaatgagaagtagtgaaataaagagaaaaaggctatgcctgtgtgttgaatagtctacaaagacaaatgactgaatttcagaattaaaaaattacaggtcagaaccaaaccaaattttctagaggcatttttagtctctccacaagccatttatttgccatatctgcatctgacctaacatctttgtgagtaacaaaaccttacaatagattgtcagaagatcactagctttttcatcaatccaaaagctaagccaatagcagagtgctccacccaccttgccccaccccctactccccagcactttgctgccacttccctagcttgtgtctccacaatgtttctggaaaatattttaattcttgactttcactgttctatctaatgacaacctcaatgtacaaattccattggagcatggtatttgaggacaatcgaatctgttttcctgggcctttatcattcatatttggcttgaggataaaatatttcctacttcctgacaactgtttttgcatccatgcccacaatatgtaccttaagtggaagcaaggcaaacactgcagaatgcttactctaaggacgtatcatcacattaacattcttgacaatatttaacaacacataattccgaaaataccctcaaggactctggtccctttctgtctccttcccattccttacacttctctcctccttttataacccaaaatgcattatcttctcagacccaggcatacttgtcatcacaggtacagagctgtgtcaagggaaactcaaagaatactgacatatttgagaaggtaaatgaatcaaggagtctttaactaaccattatattagcaaggagatacataaagaagtagaatccaaactttgtgttacattttaaaaatgattaaaaggtgcagtatatgaatagtctttgtggttcgcagtactttagtaggaaaattcaagttacacaggtggctagaataaagcacaaccttaaatctatcacatatgtggccctgtgtcttatcgcctaccaatagataaaccctgtcacccagggcactgcccttttaaacctaccttttaaacacttggaatgcattgctttggtttctgcagacaacagataatgtagtttacacacactgtttccctaacctggagagcaacttctccacatggagtaagtaactggacatggaagtcacgagaaaaactatgtgctaaatgtgtgactaaacatttgggaagctgtagaaggttgtctttgtgagtattctgggatgtccaaggagccctggatgtaaatcagaagaccatgatggcccacccaatggtattcttcattcatttcagctttgttgggtttaagatgactttttaatgagcccctgtttggcacagaagccaaggaaacacacacacacacacacacacacacacacacacacacacacacacgccagaactctaatttagtaccaggtctgttgaaatccatggtgtgtttggttgtgagaaaagaatttcccaggctgtctttgggatacagtgcttttcttctgagcagagaatcacaggccattatgagggcaccagaggccccaggcagaggtgggaaaaccaacacactcctgtgatagaatgactttttccatcatagttttgattgccaagagccagttgggatgaatttttatgaaaaattgagtttacagctaaaaggcagaattgagctcaggcatctttgctgcctgcctatgtaattcagatctattttcccagcttttttctgttattgtcccatgaagaagccttctcagacatctccaaactcccttccatgaaatttcaataatgacaaacattatgtgtatgtttatataatttctataataagaataagcgggaaacttacttggctgggttgaagagctataggaaaccttggctgctgagacctggaattggtgttctacaggaatcactgtgttccatgatgggtcatccaatatcaagctgggagttctaagcatatgtacatgtgactaggtaatattttaagttaaaacttagcttaaaagtctgaaagcatgtaattaatatcttttgcctggcactttctactagaagccacatagaaaactgagataaaaaggagaaaagttgctggactcaagacctgtagtagcaagcttctaaacctaggtcttctaagaaacagaggaaacagcatttgacagtaaaatagtgcataaaatgtggaaccatgcatgtttctaattgctaatataaaactacttgtcatgataaaaaaaagaaaaagtagtattgagaagatcacaagcatgactgagggctggagaactggcttggctggtaagagagcttgctgagaaatcagagggctggggctcttatcccagcacccaggaacaagcagacatcctgcaatggcctgtaactccagctccatggattcaacaatctcttcaagtcccatgtgtacataagctggtaaacacattcacccagacttataaatgtaaataaataaataaaaattcatttttataaaaagcatttctgaagccctaagcatacctattctcccagaagtctatctttgctaaaagtaaaaagatgactactacattgttttgtttttgttttttttttatagcaactgactttttattcttctagcaattatggtaactttatatctctaagatttaaaatgaaagccctacatctttgcagtcatttattttatgtgggctacactcttatgatctataaaaaaaaaactttgcttttatactgttgtattttatttgtcaaggacatcaggcttatttgtaatcaagaagtttctgtgaataacttatttgttgtgcacactttattacattatttctttattgttggcatcctgtcccaggtggggtcaggtcctgagacagggaagctcaaagaaaagcctggccaccagatgagtttcacacaaactgccagccctgaatagcttgagccatttttatacttcaaaaacaaacatgtttttcttacccccaacccctcagcatcaacctcaggcaaaatcaaacatttttttctaattttcaaatcaaaacaaccatttatttatttgtttgcttttatttatgcccattggtgttatgccatgggtgtgggtaccctagaactggacttacagacagttgtgaggttccatgtgggtgctgggaattgaacctaggtcctctggaagagcaaccaatgctcttaaacactgagccatttctccagccccacaatacaacttttaaacaaaacaaaaaaatgtagtaatacattgtttgtaatctaacaaataaagcttgcctgaagaacagaatgcagagttaaaccactagttaacaacatacctggttaagagctaagccacaaattagccacacacacacacacacacacacacacacacacacacacacacacacacacacacacaaagccactatttagccatagaggacaggcagtggtggccacacctttaatcccaaccctcaggaaacagagacagatggatctctgtgagttcaaggccaccatgtgctacatgagagtgaataattctaaaggagaaacagagctcacacctttgattcaaactagagaggaaaataaggcaggagctcagtgcagtgcagtgcaatgcagtctgaggtttttggtggagagcattgcagtttgcagtcatgctgaggacagggtctcccccttgttctgagccttggtagaggtaggaactctagtggcttggctgctttgtttttctgaccttcagcttgaaccctaatatctgtctctgtgtttttattattcatgttataatatgggaaattaccaatatggagccaggtaaaaatacaagggaatttaatagggaaaagccttatttacagaactacctagccagctggcagggcagtggtaagtacagcaagacaaagatgaatgtgaaagcaaagctgccacataagtgtccctcactctttggcactgcccttttaannnnnnnnnnnnnctaagaaggcagggctacagcatcccctacaattccccttttagtctaaaaggggattaaaacttaacagtgtaaagtatccaaagttaacaatcataaaggtgaaatataagaagataaaacaattggcttatgtcacatcctaactatgtctattttaactaaaccctaaagtcatctgaaagaggtgtccaagcctgaacacctcattccaatcccaaccataaacaataggaagttatccctaactaggtgtatacactatcctaagtgacaacaatgggggaaagggagcatagcatcctccaagatacttcctgctggaacgggagggcaatagccttgtggggtcctgtaggaagaaaatgttagtatagtgaaagtcatgaatacatagtatccagtccatgttagatgggattcacttgattgaagatctcgattgaaatcctcaacttgattgaagtcagcactcaaagttttggccagagtgtcagttgaaatgaagcaagttggatccagtgccgtcaaggaggtatggcccattttctttctggggaatccagggtttgctgtcaggcaggtctccattagctgtgtgggactcaaacataaatgttagcagagaaatgtttgtgtaagtatgtatactagaaaaggcaacaatgggagcataacaattatgacagggtgtacaccttgaaagaaagagccaagaaagacaaacacagtactgaaattcttctcttattctgtattacatcaaattgccttcttgatacaatacagaaactcgaaaatttaattaaacaaggtgcttggattttagaggaggaaggtcaaatccacctctaaagccagcattggtttaattgaatagggactaggaaataaagagaaatagagtcgtttgagaaacagctataaagtttaccgtaatggcacgttactgttccttttgtttgatggttatagctaccttctcttcttaagtatctacccatgcagtgtcctttgatttctggagatgagttttcctgtgaagataaaagcaaaacaattccctttgggaattactttgggaagtttctatttagtttatgagatataccttaatagaatacctgtcatttctcctcgttgagaagtttttccttttcggctcgaaccttgatcaactttgatggtatccaaagtttttcttctaccatggaaacaaatgcaaaacacctaccccaacataacaaatgtcctggtttccatacagaggttagcacatctttgtagtatactggttgattcagttcagcagttttctccgtagtccagttctttctgcagctgtttgtcctttctcgttggcattaagaaagtttggtgttaataaagcattatgtaaactatgtttgggggattttgtcttccaagcttgtttgtggagcatctcctttagggtcctattatgtctctcaaccactgcttgtcctgtaggattgtgtggtataccagttacatgctttaagttataatattagaaaaacggttccaattttgtggagatatatgctggagcattgtcagtttttatttgtgcaggtatacccataactgccatcacctctagtaggtgtgtaataacagaatcagccttttcagagttaagagcagtagcccattggaaccctgagaatgtgtctatagtatgatgcacccatttcaaatttccaaattctgcaaagtgaaagacatccatctgccaaacctcatttctccgaatacctttaggattacagcctgctggcaatggagtttgattataaaaggaacatgtaggacactttcttactatctccttggcttgttgccaagtgatagagaagtcctttttcaaacctttggtatttacatgaagtttcttatgaaattctgaggcttctagcaagcttctaattaataaacaaccgttctcatcattgccttgtgctaatgggcttggcagaaaaatacaggacctgatatgtgtaatgtatataggattattttgtttctgattgtttcctgtaattatgtaaacagtgaagttaattttgtattatcaggaatgaattctgcagtctcaatgtgtaacacatctctctgcatattgagaatcagtaactatattaagaggttctgtaaaatccaagagtaccatgagaactgcatataattctgccttctgtacagatgtacagatgtatacagactttgaactactttgcttacctcacctactttatatcctgccttacctgatttgacgacatcagtgtagaaggtaagaactccagaaatgggagtttgtcttacaatacgtggaagaatccagactctcttttttatgaatttaattctgtcagttttgggatagttgttgctaatcattcccaaaaagtcagtaagagctatttgccaatattcattatccttccacaaggaggatatttcttcattagttagaggtatactataatttctgctggatgttatccagtcagttgacagagtcttaatttgccctttagagtcaaatcagaaaacttttctatgtatgtctttaacttttttattctgttatgtggcagaagtatccactccaatatggtggtcttacctctgcatcagaatcccagaagggtattctctggatggcaagataacaagaatacagtctaaatcaaggtttatctgatctacatgtgcatccaatattctgttttctacccattgtcattatttttctgcctcagcagataatattctcagactctttagtccttatcacctttaagggccattataaatgctttaagtaatgtccttcttccccaataatcatctatagttgagaaatttccgctgataatttcggaagagaattaagagtttgatagtgatcccttctaatttgtaccttttgaggtgtggttctttgtaagtctattttgtaacctaaatagttaatagaatctcctctttgtatcttttctggggcaatctgtaaccaccaatgaggcataacttccttcaccatttcaaacatactttccaaagtttccttattggaatctgataaaagaatatcatccatgtaatgataaataagagactgtgaaaatttcttacgaattactaccaaaggttactgtacaaagtgttgacacaaagtagtactatttagcattctttgtcgcaaaaccctccacttatatctcctacctggctgtgaattattaagagttggtacagtaaatgcaattttttctctatcattttcctggaaagttattgtggaaaaagtctttcagatcaatgactatgattggccatccttttggtatcacagaaggcaacaacattccaggttgcagagagcccattagttgaattaccttatttatggctctcaggtctttcaacattctccacttacctgacttctttttgataacaaatacagaattccaagggccactagattcctctatgtgtccagcctctagctgttcctgtactaacttttctagagcctctagcttctcagaggtcataggccattgtcctacccaaacaggttcatctgtaagccacttcatcggcagggcacttggcacttctgaaggtctatcatttatatttagtttctgtagtttagattctggatggttggtaaccattttccatagcgtcttaccagatcttttctagtatctaaagattctacataatttgtatttgacactggaggaatattaatctgagtattccattgctgtaagagatcacgatcccagagatttatggctatatctgccatgtatagtttcagtctccctttctgtccttctgatccaatgcagaccacagggttaannnnnnnnnnnnnnnnnnnnnnnnnnnnnnnnnnnnnntctgtcgaactctagatagagtcccaattcctaaaaattgtacatatgcctctttaagaggtcactttgaggccaagacttttgggtaataatagttacatcctccccagtgttcaccaagccagtaataactttattattaattttcactttctactgaggtattttatcattaagaagtttgccaaaatatgcgtttctcattttgtccagtcacatttgattcttcatcgctagccaaactacaatctagagcagtattatttttcaaaataggcaaagaaatatctattcatcctgtgagagattgtcttccactgctactgggaatgaccagacctttctctatgtggggcccttcttgaggtgcccccctcggagtttcctggttttaacgggtttccttgcatgtccctcgtcgatctacattcattggtcgagtgcctgcccttaccacatcttctacacaatccagaaggcagtggccttccatatgaggcattgttagaattcgtttgtctacaatttctcttgatatgtcccattctaccacagctgacacatctaggttctgggcgcctttgtggtctcctggggaaggctcttcctaaccaaggttctggttcatagtagtagtaacctctatcctcttggtacctatgttgacctctgtaaggtgcttctccatcccaagaccttaaatcctcacctctagaacttttaatctcctattgcctttttaaacctttcaagagggcttctcctacccaaactccagtgtcttgcacattatagtcaatgttggctgcatgcaaatcccgttcttctagtggagctgatctgacctttaaaggcaaaaatactcttttgcatattgggtttgcattttcataagctattgtatatataattgattgtctcgtttctggatctgttacctgtaattctcctgccttagttaacctttgtaagaagttctggaactgttctgtaggtccctgctctattctagtataagcttctaggtgttctcctggctcacaaaccttatcccaggcatttaatgctgctttcctgcatagggacaatatatggtcgtcatattcggcctgagcctgtgggttggcatagataccctcatcaagaatcttatttaggggggcttcaaaccctttctttatgccttgatgctcaaggagcttcacttcctccctgaaaaatgctctccatttgatttggcatgaattctcaagtacagctgccaccaatcattcccaatctatgggcatcattctgttaaaggttgcctatgaatgtaatagctgttttacatatgggctatggagaccacatgagacaacagattctttaatattcttaagatccttcagatatgtaggttgccatacataagccatctgtctctgagggtgtttcttagaagttgtttcttttctaccttggtagctgggtatactaatggtgtatgagtaacaaacttagaggaatagtcatgatacctgggtggagtaggggcctcggttggagtaaaggctcccaacactttatttttgcatggattgtgcatattttcattcatgtgcttattttcttctctaaattatgcctacagatagaagtcctaggttagagacatgaatgcattcaatgttagcatagaaaaatcaaaccatttccccaaacagtttctctctctccctctctctctctctctctctctctctctctctctctctctctctctgttttagaatttgactaagaatttaaccagggtagtaattctaaagaaaagagtcatttgttgaaagcacatttttctcttttatttggagttttatttgatattttaataatattttgtgctgttttttttcagctactgcgcaaaacagtgagtgtggctggatacctagcagaactggcttttgaaatcctgtcactgcacattcactctgacctggacaaggtgtttgcttttgctgagaggctaagctgccaaatgaatttccacttcttttgtttctaaactgttaaaacgacatgtagtcacaacagccgtggatattctactattgaaccatccttctaagattgactgcatacagatttttacagaaactggagagatggctctgtgggtagaagtgtatattgctcttgcaaagaacccaggtttagttcccagtatccatttccagtaactcacaatagcctgtaactccaaacacaggaagtctggcaccctcttcgagcctctcaaacccctttgcatgcatgtggtgaacataaatttatgtagtctcacacacacatacacataaataaataaatcatttaaaaaaatttaaacagtgttacggctggatgtggtaacacacaagaaatccaaacactgagaaagctgaacaggcaaaactgcaaaaatccaggcagcctagagttcaatgaaaatctggctcagaaatgtaactttttcagtgttctacagaattaacaagaaatgatttccttcatattaaaaatgagaattcaatccacacacacgatttttctgtaaatttttagagaaagggattcattttcatataatttcccacttcactctcaagatagcagtctttataatttttctaatattctttagataaatttagtaatttttaattacctaagaatagtacatatagggtgagcaacagtgaactagctatgattaataaagatatttgagagagaagtgaacaggaagaattaagtccaacagaagatgaagaaggaagatgtggaagtgagttatagaaaataatctaaggatgtctacttttctcattaggaaacttaatgacaataggcagtccttcagatattggcaaccatgtttatgtgtcaatgactcctctaagaaaagctgcatttgtggctgcttgtggagcagactgcacaattccagggccatcatttacactgtggtttatgagactggtactggtgaactacttagtgtaaaacctatgtgtcaaacagtgactctatcttaagcatgctgcacattaacgtttatgatcctatgaagagagttctacagcaatattccacttcacacataataaagctaaagcaaagaaagattaagtatctcgccaaggatgccacagatggatataaagccagactccaattcaatttccagaccaccacacttctgcataggcaataaacttctgttgaattgaactaagatgtacagaacttaaaataaatgttgctgtgagtacaaagaaagaagcaatatcaattcaggagagatgagaaagaaattatgtggagaacaggaacattaaagcactgatagaggctactgctagggtgtggagcatggactagagtaggaaagagatccatctgcaaaagaattctacactctttatcaatgtattcattgacagttgcatgcatctataatatattccactactctaccatctcctattctcccaccaatcccccatcccacttctgtcttctgtcttaatatatattgttttgacttcgaggcctactgagtttaaccgggaccactcacatggccatgaatatgaaacatgagtaactcagcagtggctacatcactgtagacaaggacttctttcctatttgcaccccagtgtcattaggtgctctggatgcgacaggacctcataaactctattctaactgtggccctttagttttaatacaaaaagaagagagttccatgagaaatacccataagatacagagaaaagataatgttataatttaaaaataaagcaatatagtcagcctcaatattcctggctgacattatcactcaggtacattttattttaatgtacctgagtgagtttctgcataaatgtgaattctggatgttccaagagagggtagacgagattggattcattggaactggagtcacaagcagttgtgagccattagatttggtcacagggaactctagtcctctgggaaagcatcaaggactcttacccactgagtcatctctccaatcccgagctgtgccttatacagcatggtgacaaaattcttcaaataacaaaagctctagttaagaaacctcaaagaaggaatgaagaattgtgcatacacattgactttgcactgttaaaaactgtgaatgtcagtgccctagagataaggccactatctttctggattttcactggctgtttatagtctgtatgtcagctctagacccaaaggagccttacttcaggccacttgcttcatggggactcctaaaactgtgtacaatggaaggctaagattgttttttatgatacctatctttcacaattaatttattggaaagaaaaactgaaaatctcattgtggaaaaatatattaaactacttatactggcatttacaaaactccttaggatttaaggaatcatggattaactcctagaagggacataaatgaattctgttctgctttacggatattgaagctgccatctacagtataggtgttttagataaggaagtgtattcaccaaacactgtgtgtattttgtctgtaggtatacacttgtctttctccatctcatccctaggttcatggcttcacatccactgaatttgttgtgaactccagattttgcttctgataatgtcttcacaaacagcttctcctgaggaatgtagagctagttagtctcaacatcattctcaaatggtgttttgtctgtagtcacagcatataaacacatagagcactgtcaagctaattttctagttgtttacaataaaacaattatttttaataatagttcatgaggatattgcaagaattttattctgaaattttgaattttatgaacttttcagcattcatattgctttttattagatagacttttcagattattttatccccacctttcacacaaatgttacccaacattttcttttgaaaggatagatgcttacactctatatgtgacgcttaattacaataagtttttagagatatttatcataaattccttatggaaacatatagaaatttgagctggttaatagcacaattaataatatttagagttaaataacaatataattaacatgataattaataaattggtttgtaactgcagggagctctctagtggcttagttttttgctctgatataatttagcagttgccaggtatttttggtacattacctagaatacttttcaaagaaaatgtttaaacaataattttaaaacaaaataatttaggtaaaaatttaatttgtaatattttaagcataaatagtatagcaacatggaatgtaatgtaacatggatttaaaataaataatgctatcaagagaaaagaattaacagcaaattgtaaatgagactgaagataagagaaaagacagcatgtcaaatgctatgtcatgatagggcaaaattatgactgatttgtacacacatatacagacatgcacacatctggttttggtaacattagtgaacaagtaactcaaaagaatttttgaagattttttatttgataatcatgtacatatgtgcatgttggtatcaggatgaatatatatgacggagtctggggaagtagactggtaccttgggactggtgttacaggtgcttatgagccacccaaaataagtgctggaaactgaacccaggtcttccacaagtccaatgtgtgctcatacccatagagccaactgtctgaccccagttccaaagacattcaaaattcagtgtagagtgtagactatttctctctctctctctctctctctctctctctctctctctctctctctctctcttcctctctgtcacacacacaagtgtgattataaatatttcaagaagcaaatgataagtatgtttacttgacagacacattttgaaagtgtgtttctcacctcaattataatgtcttagtaattcacttataataattaggaaaatgtgtaaacagggatgaaaatataattgtctttgacttatgataaattaaactagcctaattccagtccatcttccaaatctacaaagagccatgccaaagacagcttgacattttcacacagtttgcaaacgaaggttttggcagtgagttccattgttaaataagtcattaggcactagattcgtcacaaaacatacaaaattgatgtttgtataatatatgcacaagagatggatttcaatgttgttaaaactatagttacattgtcagttctcaaatggcaataactacttagtatgtatataatattctaatacattatttagataatcttaaatttagcaaaataataaggaaaacaaaagcaatgaatgattctttgtcaagagtctatccagggctttcctctgagggtctagtaaataagatgcttaagaaaacaaggaggatgagaaatgcctttgccagagtctagtataggatctattcagaagatacaagagctgtttctctgagatatttaggaaaacatagaggaacatggaaattggattatgtgagaaataagtttacttagatggttgaaatgtatgtataaaggatgccttaacacttgtaacccaaacatgaaccaaaccaagagcagctgttttgttcttcaagaaacaatgaacaaaatacctgaggccatactgctggaagatcgagatgatctagaattgttggaattagagggaaagggttgtacaggtcatgctaagaaattacttctgtagggaagaggagccaaatatctaaagggtatggtgtgaacatatttcattattccttttttacaaatctatgctagtttcataatttgtgaccaactatcaattaatcattacttgagcatcaaggagtgtgataaaaatggacaaaggaatggtccaattcagttgtctctttctggaacttactacatagcagatgagataattaaaaatatatatcatgtgataaatgtagtggcatcttaccttatcagtgaacttgtggtggtggccacacacttttagcatggtttaaggtgcagacaagacccattataaggtaaaggaggggctggctcttgctctcttgggttgtggagagcatctgaagggtagagactgcatcttctagagcaggaagactgtggcggctatttattctgtgtaagtgcttccctaataaatacctacttatcatctatgttgagtctggtggacttatttaaacccctccttcagataattgctaaggaaagatgaggcccaggtgcttcttaagagttagcaaagacatctgtcaatgataaagaagaaaagatacagagttaggaaagtctagaataaaatgatttctacactaagatgggaaaagatggcaagcaccccaagcagggaatgaaatggctaggtatattagacagatgactagcatcaaataaaatagctgcatgactgacagctaatctcaggaataacttagtatctgaaatgtgacctaaaactctgtattttctcagagcgatttgctagagacaatgtaaaatgttaggcattttttaaatgttatccacatcagaaagctatgagatggtggaataccagaataacatagtcatattaatgtttaagaacactgcaggtggaatgaattgtcaagatattgcaaagttctgaagggatggtgatgcccatgctaggggtgtagtggagatggagagacattgacataaccagaagagactgggggattaggatggggattggtgtaaattgaagaggaaatgggattacagctaatattttaagcataaatagtatagcaacatggaatgtaatgtaacatggatttaaaataaataatgctatcaagagaaaagaattaacagcaaattgtaaatgagactgaagataagagaaaagacagcatgtcaaatgctatgtcatgatagggtgtggtgtcagatagaaaggaatgaaaatgaatccaatttctcaagtgttaagattctgattcctaaggacacagataatgcttttctgaagttcctttgaaaatttgagaaagagttaggcacacatttacataattgagatttgtctgcatactgctaagaaacaaaagatggcagcaaggcatttaccccattctagataaagcactcccatcatagcatttaggcttctactattttgctcctttcttcaatacaacttgataattggagatacaccttatttcagtgtcagctcaataactggaagagaatcatgagtctaaaattataatacactggtgtgtttgcatagacaagttgccagcttcaaacctgtcacaatctggtcaatggtgtgcaagcaaagtagaaaactcatatttttttgtaaaacatgaaagtggttctgcctccccagaacctaggaaacatgaaggactctaagggataaatggtccctaggaatggaagtagcatgaactgaactaattgggagtatgagggggggagggagctgctacaataagagcaagagaagaggagtagaggagaggaaatggagggccagaaatattgagttgggggaagaatagaggagagagggcaggatgagagataccatatcaaagggagccactataggtccgagaagagatctgcaactagggagatctccagcaataactacttagtatgtatataatattctaatacattatttagataatcttaaatttagcaaaataataaggaaaacaaaagcaatgaatgattctttgtcaagagtctatccagggctttcctcctactacagtgaagacatcattaaacacctcagagaaataaatatgtcttcacatgctcatagcaactgttgtgtgttcatgcctttgagagagcattgaccacctctgaggaacacatgctccctgagcctttctttaacctgtgtacatcatgactgttcattcccaactccacagatcccaatctgctctggactggctagcttcagactccttaaaagacttgtatagcttccaaaactcctcacagccctgtaggaatgatgtatacagagctgactggtcttatgtagcaaatgaaggtagcatctattccaagcattgtgagttaaataaaataggaaatatgcaaagttttaagggtagaatgcactctgtttagttagtagttggcaaatgttcatgtgcattttctataacaaacttccttaaactatcattggatttcctgagagaggtgtggctgaggtgtgcattcatattcagtcctttgatcattttcagaagactcaagcaccccaaacagactagtgctctgggcttataggggttatcaaagctaaaactatcatttttatattatcatctcactcttcattgacacaggaagacctaagaagaagatacattctctatgctcatgtaatcgccacagttttttgtaaaaatgcaatgcagaccaatgtcagtaagtaaccagattctcccttgaaaaataggaagattgaaaaaataggaagtttgatctgggggcatttgctatcttgatataaagaggtattggatgttggacttcatcagtgtgggtgttaatctcaaaaaatctggttttatgaataattttgtgtcaattgcttctaaattagatccatatttcccctttgaattcttaattagtatctttgctcccatctaatttaaatttaacatttttgttttctttgcacagattctatttctgtgtgactctaaaaatctctaaaagggtgtttctgaaagagtccagatggtactgataattatttattatctttagcttcacccattatctgtcatgcaatctgtgaactcgaaaatcttgttcagactctgagttgccattgaaattcaatgaaaaaagtctcaaatagtaagttcagaggagtcaggcatactatggaagtagaaatactttcaaagacttaattaaaagtctgatggttgctccggctgaacattgggattttatgactctaatctttcctgctcatttctaacttgttgaataatactgggctatatttccatagaacttgtcaatagtgtgaattaacttttatctttcactagactgaaactgggcagtgggggaggggtgatcattgcagacatattcttgccaatgtaacaattgactaagggacttcagttaattttcactgaagggaaatgaaggcattcctccttctgcaaaaaactggaggggatgtctcacaacatcagcattaccatatgaacatcttcaaaaactagaagataaattttatattattacttttactttaggaccaaacctagtaaatgtctggtacattctaattatttgcagcctctggaattttcctcagtttcttgctggacacttaaaatgtacaaactttgctccatccagaaccatactatttaatatttcctaacactttatgctcatttgtgatataacatttactgcattttattatcatttattttcatctctttctttagatgaccccaatgtatatttccatagaacttattgtagtgtgggttaaactttcgtatctcagtgttgcacatggaggcagcaacaaagaaatattaagtataaagcctactttttctcataattatttttgttttaaaatatcatgcagagtagatttgtgtgtgtgtttctttaatacatcccagctaaattctgaagtcccacttctatcatgacaaaataatccataatacatacactcatcccattctaaagtaactgtgaaagaggacaaaacttcatgaagtaacatttcataagctagacagcatgtgtctcagaacagacacctacgtaaaggatgtcatcacatgaccataccataccaccccatgaccatatcacccatgaacataccacatttccacatggccataccataccaccccatgaccatattactcatgaacataccataccaccacatgatcataatatatcacccatgacaataccataccaccacatgaccataacattcccccatgcacatatataccattacactaacatgccactccaccacagaacatactcttaatgctttctgacactaaaggacttatttgcaagacagagcagtcaaagtgaactgcacaggcaaaagtaacaacatggatatcttgaaactgggtgtgacagaattctaaagtggaaaatgtctgggtgggtgacaacattatatataaagtactaggacagaactggatcaagggtgagacttcctctcatagaaagactttgagaccagtaactactgctacagggtggaggcacacagaaatgctgacagcttccaaccacagaatgcagccaacgtcaagagagctctctgaacatcctggaaattcagctgacactagaatatcttaggcccatggatcattccccagagttgctgtcctcaaagtatccttgattatcaacctataggaggcaactatatagtcacaggagtccagaaagtcaaaagagtttccattttaacaccaacagactattatcttacctgtgttaatatttgcattgacagagaaaaagtaaatgtgaaacttgtcacatacaactatcaatcataacatgatgactgatctgctgaaaatggtgcactcctcactgtaggacactgattgtataagattaatattactactacattcatatttctttattcaacctaaaaatgtccttgatgaagaagtataatttcttaatttcattaaattttgatgttgcatatatattattaacagcctttgtatatgcataaagcacctcagctgcataccaaaataaaatagatatcattaaaaagcaaccatacaatatctgagctacaagttacatactttttcctggaatggttttccttgaaagatcaatcagaggagatgttcaccatgtttgaatactctgtaggcacattctaaaagtttaataaactgaaaatttcaagaagataattcagaatatttatatgaatgagaaaattttaaatttcaaataaaaattgtgatttttgaaaaattgcatctgcttctatgataatgacagattctcaatacttagtaactctctaaagacatagtgagtatagatatgcaaaaagcttattaatggtgggatgtggccaacttatcagcatgctttatgacaaaatcctacataaggaaatattcctttgaactgtcagcaacatccagaagattttagtatatcaaaacctagggtttggtgagatagttaagaagataatagcacatgttgcttttgaggagctccagcgttcattgcctagtaccatgtggggcagctcacaatcccctgtaagtccactttccaggggtgcaacaccctcttttaacctctgtgagtactaacaacacccatgtgctcatgttcacatacatatacatatgaataaaaataaagtatttaaaagataaatgaataatgactttaattccataggtttctgtgtgatcataaattgtaatttaacctcagtttaattcaaatgactgtgttcaggataacacaaagatcctatttacacagttgattcaggtttatataacatgctgcagaaaggacattttagaggaatagtaagccatgttttgtttaaacacaaatttgagtaggatcctaatattttgaaagtagttttggctttaaatatataatcacattttgtcatcttgcttttttaactgtatgcctcattcctgtaagcataacaattttaatgtagaacaatgaaagaaggaagaaaaagaaacttgttattttaaattgaagagtatttctagaacacagataatgtcatttcccagttggtttctaataagagttcttctctatactttggctgttctgggcattagcagggtatgtgaaccctagccaatgagagaagactcctccattatacttacacctctcagttcagcactgtggtatgattccctctgtaattctaaaagaaacgggttctccatttggggtgtttagttttgtttgttgttgatgttttcttttttcataaattctcctagattattattttaaaatgcagtcctattttaagatacagaattcaaaataatgaagtcataaaatacagttagtgcaattcactaaaatgcagaagtatagatgcctcacaaggacaactcttataatcccattactctgcctgccacgcatgactggctgccttgtgtgttagttctattcatttcttattcattcatttatttatttatttattcaatcttttgcttttacacagtcgcatgtatggttttcctttcaaattatttgagctgttgaatagaaatacaagtaacctttggctattgttactgtgtagaggaaaactgtacacacatcaattaatcataagtttatttgtagattttagctgttacctgtgtgtaaaaccatggtatctgcaaatggtaagttgtttctcttcgttttcagtccatagaactttgcatcttgactttgagttttattccactaccctcaattcttcagaaaagccttgaatgctgatattattctaggttcctgtactttctcagaaaaacatatttcattatctatcctttaatctagatacatctcaatacattaagtatggagaggtctgtgatgtcataaacttaaccaaattaactgtctttaaaaaccacttcagaaaggctagggaaatagctgtgtcagtaaaacactcgctttttaagagtaaggacctgaattctatatcggaacataggtcaaaaagcaagacacaatgtgctggcaacaaagacaagtgggacttggaggctcatgggccagtcagcctaacctacttagtgaattccaggccactgacagaacctatctcaaataacagagggaaggacacctgaagttgtcctctgggtgccacaagcatgcatacaaagataaacctgcatacacatgaatatacacacaaacagcaacaacaattactgtcaataacaatcatatccctgcctatcttacaaaagaagatagggaatatctgttttttagatgaggtaaaatcctgaaacaatagctatctttatacattccattataatcattataatccatcttcttctaaatatatttaattttgtaatcaatacaactcagggattctgcctcagagtatcaggggtgtcttgtctttgtgctaaactttgtcagcatatgggcaataactcctccttctgtccaaatatggcttacttctcttccaaagctgttcatgcctatataactctattgacatcttttctcttttaaaaggtaaaatggcacatactgacaactttttatgaaacagtatgtgatttaacatgtgtagtatgtaacatggcttttgaacccaaaccactggaggaaatggtgcatcaacagggtcatttctccattcacatatcccactacagacagtgtcatgtaaggcttatgcatctcctttctgaatagaaatcaaagtaccaagtgataatatgttttagttcacttcaattagtccaccagaccacattataagagcctaaaggccatcataatggcatcacagaatccatcttcacagtttttatttaaagatatcacatggacgtctggcttgtaaaactccatgaaaaataattaactcttgtcagcattctgtgtcgttatgttcagatatggaacatttattaatattcattacaattttgtgtaaacgaagaaaataatatataattaaaattttcaacagataaactaaaaggtataagaaaaatgctttttaacaccaagaatctagtgtctagcttcctaatgcagatgtagagaggtggcagtaagtgctaattacaatgatggcatttaatgtaaaaaatgtaatgggcaatgcatgtatggaggtgtgtatatgtggctgacaggaggacttattttcaggcttttccttaaagagtcagtcagatggaattttacccaagaggaaaaaaaaataatttcattactatagttattaatgcaagtctttgggaaagcctctatcaaataatcttgcatggttgaatacatttatagacaaaataaaatgtcagacaaaatctaccaaaattgcaatggaaaaaactttttgtcactaataggtaggctctagaaaatatgcttatttcccgaaataaacttgcttatttagcgagtgcttgccagtgggagcccattccaaaactgagggaaggaattgaaaatgaaaggtggtttttgagcccaattcaaaactgaatgcattgaatgactccacctctctaacagcatgacttctgagaacaccaggaaatttgctgaaatgaggaagaatgtaacttttgtctctgtattggcagtgttttccatcaatccctttctaatactcttaattttagagtgtaaaagtcactaccaatttcagaggcacatttgaagtaatagtaaaggaggatgcagtcacatatgacaactcatttcaggctgagaactcacagtcccgatgccaactacactgttcttaacagaggtggagtgccctagaccttacctaactgcacaaagtatagtttacctcactgttgacaattcctattctgacactcaccctgtgatctagcatcccagagttttacaaaaactaaaatttgagattttaaccattcatatgtcaaaaaataaacaagagtgttataattttaccacgggagaattgagatgactacaccctttctaccattcgtagattagaactaggatggttttcattattgcagattttctttatttgaattagaaatgagattgtttacatgacagtcctagttcctaccctaccaaccccccgaactaaaaccctatctatcaaatatactttctactccccctagatggtgaggccttccatagggtgtcatcagagtctatcatatcctttgggatagggcctaggcccacccccatgtatcttggcacacagagtattcctctatgtgcaatgggcacccaaactccacccctatgctagggataagtactgaactactacaggaggtcccacagatttccaaggtttcctcactgaaacccatgttcctgggttctggatcagtcccatactggtatcccagctatcagtgtggggagcaagagttctctgatgttcaggtatgctgtttctgtgggtttcaccagcctggtctgaacccctttgctcttcattcgtcctcctctgcatctggattctggttcagttcagtgattagctgtggatgtctgcttctacttctaccagctgctgcatgagggctatcaggtggcatgtaagtcagtcatcaatctcattatcaggggggaacatttaaggtatcctctcctctgttgcttagattgttatctggtgtcatctttgtagatctccagacatttccctagtgcctgatttctctgtaaacctaaaatgcctccctctattatggtatctccattcttgttatcttctattcttcacctgattcaaactttctgcgccctcatgacctctgcatccctcttcttctccccttctcattctcctagctcctcccacctctttccatgctcccaatgtgctcaggggatctcgactcttttcccttccccaggggaccatgtgtgtctctcttagggtcctctttgtttacaagcttctctggcagtgtggattgcaggctggtaatcctttattctatgtctaaaatctgcaaatgaatgagtacataccatttttgtcttattgtgattgggttaccatgctcaggatggtttcttctagttccatccattttcctgacaatttcaagattccattgattttttccactgagtaagtagtactccattgtgtaaatgtaccacattttctctatccattctttggtttttggtcttttggagaccagcttcttgagttctttgtatattttggagaacagctctctgtcagatgtcgggttggtgaatatttttacccagtatgtggattgctgttttttcttgctgactgtgtcctttgccttacagaagcttctcagtatgaggaggtcccacttatcaattgttgatcccattgtccatgctactggtgtaattaatgttcaggaagtagtctcctgtaccaatcaattcaagggtatttcccagtttatcttctaataggttcaatgtggctgggtttatgatgatgtctttgatccattttgacttatgttttgtgcagggcaatagacttgggtctgtctgcagtcttctacatgtccacatccagttatgccagcaccatttgttgaagatgttctctttgttccatcatatgaatttggattgtttgtcaaaaatcaggtgttcataggtgtgtggggtaatatcagtgttttcaactctattccattggtctacctgtctatttttgtgccaataccaagctgttttcaggactatagctctgtaatagagcttgaaatcaggcatggtgatgcctccagaagttactttagtgtacagggttgttctggctatcctaggtcttttgtttctccatataaagttgagaattgttctttcaaggtctgtgaagaattgtgttgggattttgatggggattgcattgaatctgtagattgcttttggcaagattgccatttttattatgttgatcctacctatccaagagcatgggagatctttccattttctggtattttctttaatttcgttctttagagactcaaaattcttacaatacacttctttcactttttttgttagtgttaccccaaggtattttatgttttttgtggcaattgtaaagggtgatgtttctctgatttctttctccaccaatgtgtcatccatatatagtagggctagagacttttttgagttaatcttgtatcctgccactttgctgaaggtgtttatcagctgtaggagttccctggtagactttttcaggtcacttatgtagactatcatatcatctgaaaatagtgagagcttgacttcttcctttccaatttgtaatcccttgatctccttttgctgtcttattgctctagttagaacttcaaaatcaatattgaagaggtagagtgagagtaaacagccttgtcttgtcctggattttagaggaattgtattgagtttctctccacttaatttgatgttggctgttgggttgctgtatattgctttttttatgttgaggtatgttcctattatcccagatttctccaagacctttatcatgaaggagtgttggattttgtcaaaggatttttcagcatctagtgagatgatcatgtgattttttccctcagtctgtttatatggtagattacattgatagatttttttgtatgttgaaacatccttgcatccctgggttgaagcccacttgatcatgttgggtgatttctctgatgtgttcttggatttgatttgtcagtaatttattgaaaatttttgcatcaatgttcatgagggatattggtctgtagttctctttcttagttttctctttgtgtggcttgggtatcgaggttattgaagcctcattaaaagagtttggcaatgacccttctgctgctattgtgtggaatactttgaggagaattggtattagctgttccttgaatttccgatagaattctgtactgaagccatctggccctgggctttttttggttgggagacatctgatgactgcttcaatttcattagggtttataggtctatttaaatttcttatctgttcttgattcaattttagtaagggatatatacccagaaaattctctattttctttagattttcaaatttgaggaatacaggttttcaatgtgtgacctgatgattctctggatttcctcagtgtccgttgatgtgtccccgttttcatttctgattttattaatctgcatgttcactctctgctgttcagtaagtttggataaaggtttgtttatcttgtggattttctcaaagagccaacgctttgttatattgattctttgtatcattctcctagtttccattttattgatttcaaccttcaatttcattatttcctgacatctgctcctccaggtgtattggcttctttgtgttctaaagctttcagttgtgctgttaattctctagtgtgattattctcctgtttcttcatgtgggtacatagcacttagcactccttcctcttagcactgctttcaaagtgtcccataggtttgggtatgttgtatccgcattcatgtgaaattctaggaaatatttaatgtattttttatttcatcttcgacccaggaattgtgcaatttggtattacttaatttacatgagtttgtaggttttctgtaattcatgttgttgttgaattctaaccttaaagcatggtggtctaataagatacagggggttatttcaattttttttacctgttgaggtttgctatgttgccatgtatgtggtcaattttagagactgttccatgtggcactgagaagaagttaaattgttttgtatttggatggaatgttctgtatatatctgttaagtccaattgggccataactactattagttcctttgtttctttgttaagtttctgtctggtgttcctgtccagtgctgagagtggagtgttgaagtcttccactataagtgtgtgcagttttatgtgtgatttgagttttagtaatctttcttttacaaacgtgaatgcctttgcatttggggcataaatgttcagaattgagacttcatcctgatggatttctcctgtgatgagtaggaagtgacctccttcatgtcttttgattgattttaaagtccaatttgttggatattaggattgctaccctcttgtttcttgggtccatttgattgggaaatcttttcccaacctttaattcttaggcaccatctgtctttgaaattgaggtgtgttttttgtatgtagcagaaggatggattctgtcttcttatccattctgctaatctgtgtctttttataggcaagttaagaccattaatgttgagggatattaatgaccattgattgtttattattgtttgtttttgatttggtgatggtgccgaaattatgtgtgggattctatccccttttccttttgggtgtcggtaaagtgggattatctattgcctatatttttctggttgtagttaacttctttgggtagcagttttccttccctaattttttgtagggatggattggtggatatgtattatttgaatctggttttgtcatgaatatctttttttctctatctatattaactgaaagcttttctgggtatagtagtctgggaaagcatccatggtcttttagtataggtagaatatttatcaaggatcttctggctttcagtgtttccatggaaaagtcaggcataattctgataggtttgcctttatatgttacttgatctttttcctttgttgctcttaatattttccctttattctgtatgtttggatttttgattgttatgtggtgtgtagacctgtttttttttttcagtctatttggtgttctgtaggcttcttgtactttcattggcatgtctttctttaggatgggaaagttttcttctgtgcttttgttgaatatgttttctgtgcctttgagttggatttcttcaccttcttctatacctatcattcttaggtttggtcttttcatggtatcccatatttcctggatattttgttttagggatttggtggacttaagattttctttggtttgtgagtctatttctcttagtgtatcttcaacacctgagattctctcttccatctcttgtattctgttggttatgcttgtgtctgtagtgcctgatcatttacccagcttttctatttccagcattccctcagattgtgctttctttattgtctctatttcagtttttaggtcttgaactgtttccttgagagatttgttgatatcttgtatattttatttgttttttcttccatttctttaagggttttctcatatcctctttgagggcctctatcattttcatgaagatgtttttaaggtcattcttttctgctacatctgcattgtgatgttcaggtcttgctggtgtatggttccttgtctccagtggtgtcatattgggttttctgttgttgaatgtgcttttacattgtcctcttctcatcctttcttttgatgggtgtagcaggagtctcttcctctcctggtgggtatggaaccaaggttcccttttggtagatgcaaacagttccaatactctgatgtctgtcctcttgttgtggatggaggcggagctgttacctgggccttggcagtgtctgtgtgtgttggatcccaccttcaagttcagatctggtgagcagcaatctaggatgttttaatggatgccaaaatcttaatctcactcttcacacaatgcaggactctgtgctcagttgaagttccccccactcagaatcgttatctccagttccctccatccacatggaaatttcatttttcacaacagccgaactttccttcagtggttaaatatctaggctattttcattctctaggtctggtgaatagagcatcattaaacacaatgctctatgtttgtgtgacatagagtcttttgggtatccacccatgaatgatatagctggatcatgcagaagatctgtttctagctttttgaggattggaaatgctgatttccatcgtgactgcacaggttagcattcccaacagaggaaagtgagcattgacatctacctacatccatgtctgcatttgttatcaatttttcttaatatttgctcatttttactgaggataggtaaagtctcaaggtatttttagcttgcaattccctgataactaaggaggttgaaatttaaaagaaaaatttctcagtcatttgtacttcatctttttagaactccctgtttggtggcatgcttcaattgtttattaattaaaacacagtatttgtatccaatgtaatacaaatttgttttcctgatgtttagttttttgcatcctttgtatatttgagatatgaaacttctgatttttgtttatgttaatttgtattctgctaccttgctaaaagtgctcagaagcagcaggnnnnnnnnnnnnnnnnnnnnnnnnnnnnnnnnnncagagtccttaaagtcttttatgtatagaattatatcatctgaaaataaatataatttgatttcttccctgtgctcctttgatttcttctgtgtgttccctttgtatttgccacttatgactttagctaattcttcaagtactatattaaacaagagtggagaaggtgggaatccctgttgtgtttccaatgttagtggttttaatactttgagtttttctctgtttagcaaaatgttggctgtgggattgctttatatttcctgtactgcttttagatatatcccctgtgttcctagattctcctggacttttatcatgagtagatgaaaccaaagcccaaaaaggacaaatattgaatgttctctcatatttgcatgcttactttgaatctaaagaactttgcaaaagtcatatggacaattacaacttcagaaccttctaaaatgcaatgggctgctctattagagtttccatagtttcccaaatacgttgccattgctctttagaatttgatggggagactctgtttctaaagatagcatatacttgagtcattgaacttggagaaattgatctggtatgacctggaattttcattcctactggaaagtgctgtccaagctacttgaaaaaagtcttaccaagatgtgaattctgtaatatttggctatgtgaagctaaaacttttcaagtttgggtctctctcaaacatttgttctttaaatatagatattactatgcttgtaaaaaaaattgctgtagtcaccccccacgctccctacctttgccataaaatgtctagtgttggacaataaatatgttaagaaagatagcataaaaaagatctgagatgctatgagaggcctgtggcctgtcagtagaaaaggtaaggaaataccttaccattagaggcatgatctgagaaaatacatggagttctaagagcatgctgtgctgggaaaggagaggaattataaaggaatgaaatatgaaagatgatattaaacatgaggctagaacatgcttttataaagtcatgccaaagagtttgtaaagttctgttgatttccttcaaatttcaagtataaaaatgtactaaatatgaataaggaaagatttcttcccctaaatttctctcctcatgaataagagctcatagaactcacacactgcagaaaagcaataataaaatagattgaaggctccgctaaaccctcatcacaacaactccagcaggcaaccaaaagctcatttcatggaactgcaatgcaacattaaagcctcacagatgcaatttaggatgctgctccttttaattctacttaatgcttttataactatttcaaaaacagaactagctaatcgtttcatgattccaattgtcataatttgtaacatcaacacattggttctgcatagagcaactcaccattcaaaagctcataaataaaaatatagtacaattcctaaaacaaagaactctgctttcttgttttgttcttcattataacattacatttgtttattttatgtgcatatgccaggatatgtgaatgctactacacatgtgtggaggtcagagacatcttgaaagtcctcttcttctatcatttgggttcccaggatggaactcaagttaccaggcatggtggcatgtgtttttatatactctgccattttgccagcatttccttcttgctttcctgtattttactgagtatatttattcattcacaatattttaaaagcacctcaaatggacatgtctaagatacatacatagttgaaaagtgtgcttttgacattttcctcttatgcttgcattggtaacacaaacagatcagtccagacagaataccagcagctccttactcatgctagcttactaaagtctacagattctattgctaaaatacatcaagatttctttttacgacaatcaccattaccctgctcttccccataccctcctttcatgaggaaattcaaacacctcccacatttcatctctccctccactcctactttgtcatttgtctgctgtctgtagtgattcagaaataatactctaaaacacaaatagtagcatgacactcatctgcttaaaaccatcagtacttgacttgtatttgacaagtcaagaacaaaatgacaagaacacaggctaaaagtggtgcctttaaaagttgacctgatacttatgctcagttttagaaccctctacatgggtgctggcaagggcacatgggtcctatttaagatcagttcttgcttgtatccactgagccatcttaacatagactattcactacttattaactgtcccactaagggtttgaaaacaacatttttaagctagtagtatgtccaacacccattaatattatattgtctttcaagtaagccataaagttaagattggagactcatcttaccaccaccaaaaaaaataaaataaatgtaaacaagtagtttatgatcggtatacaatgagggtttagcaacttcattgtctcaaatggtttcaggaactaactagggaaaaaagggacagagaggaagagaggttgaaagaaaaccaaatttctaggcctcactctggccatgacttcaaaatgtaagctctccaaatcctaaacagcagggtcggtgctcacacatttgacagcctgtatgctgtaacttcattttctgcttgaaataaattcaggataaaatatctatatgtttcaaaagtgtactccataaagatgtgcagatgtacattggtccccagtgtgctatttcagattatagacagaacagggactttcagcttgtcgtgcaatcttgaaagactgttgacagaatccagctagagaactctggagagatcataggctctcaggcatgaatatgcacataaatgtgcatgcatgtgttgtgtgcatgtgcacacaaacacacacacacacacacacacacacacacacacacacacacacacacacgggaagagagagagtggggaagatggggagaaagataggggggaaaagagagagagatctacaaatgtctactgcctgttcatgcttgcaagactctaatccattgctgattcaacacgtctaaggcatggaactcactgtatcttaagttatatcattgtgttgaacaaataagaaagatactaaatgttacttgctatctacacctattcccctttctcctgaaaacacaaatagaactatttctatcctgtgggaactgatgatctgaccagtcacatttaaaagtatactaaatggcatcaagttatttatcaacgaagcatctaaactggccacattttagtatgtgtctgttgtacatagatagatgagaaatagaaatgatagagacagagatgaatggcaatagaaatgacaggtgtgtgtgtgtgtgtgtgtgtgtgtgtgtgtgtgtgtgtgtgtgtgtgtgtgtttagagacttactagagagacatggccatatcaactatgggaaccacctccatgcttatagagaaataaagatcttcagttaagtttgtcagaactaaaaactaagtgtgaggtaaggggaccaagaagtgaacctgtaagcatggtaaccacaaaggtgcctgtagtttctactgttgttttacaacctaaaatttccaacattcatgaagggttatcttccgaacttttcaaccaccatcattatgtggcttagcatgaagctggtcgagaagtcagagcacctggaagagcaggtgtggtaagagctaagagaacttaggcccagctgccaacaaggtaagccagcacacaattgttcatgtggctatcccatggtgtttcccatcctcctgccaaaatgtagaatgtattccagcaactttccaaggaagggagcagaaggaagactgttcgagctcaacgaggctaacacaatagaaaccctaaccactagtcatccattttattgacatacacacctcattctaaaatagttatgcacacttcttgttgctttttgctcaaaaggaaaaaagtattttatgtcttgcaaatgagacagtccaaaataagcccctgcataagtgtcacaagttgaaccagaaagtgggaacagaacacattccattttatcaccattctttgtagctaagaaacagcccatgtggtcaagcctgtaacatcagtggcataatcttgctcaggcagaagacatgaggtgaatgactgtatttgattttaccagatttccttacagtttttttgttttgtgtgtgtgtgtgtgtgtgtgtgtgtgtgtgtgtgtgtgtgtgtgtgtgtgtgtgtgttgtatgtttgtgtgatctacgaactccatgaagtataaagacaggatttctgttcagtcttattcatacagatgtttttcttttctatttacttttaaaagaagcacaggaaattttaaagagttactatattatgtaagaggggtgtgtgtgtgtgtgtgtgtgtgtgtgtgtgtgtgtgtgtagatgaccacagaatccagagttccttggtcccctggagctacagttacaggtggttgtgtgataccctacatgggtgctggaaagcaaacttgagtcttcagcaagaatagtacacattcttcactgctgaagtatctcttcagccctataggcagaattttgacattgcctttacagattttttacagcctttatttttatttccatgatcacttctcattcaaggcttcatgatttttgtttttgtcttttgcctgatgcatgtgtaggtcctgcagctatctgaattcatcaaacaaattggtgtgtgtgtgtgtgtgtgtgtgtgtgtgtgtgtgtgtgtttctatttggaatcccacactgaaaatgaactaaggtgaacaaacaatgcagtttgatgttcacctgcagagcctttgctttctgattcagatagaagttcatctctctgttgctttaggaaaaaaacaccagaacaataaaataagccttcattaaatctgatgtgaagttattctccttgtataagctatgtgggccctgagagtgtgttctgtcatacaagctatgccagggctcttattcaatatagctttgaacaaggttctacctacacttggcaatctgtcagatctatatatgaacagtgaattgtaggagccaaataaatcctatctgtacaaccaactattaccaacatgctcttaagctaaaatcctgagaaaattgtgtcaatttcttgttttttctcaaagcccatccttcctcttgtctatagacatgtgaagctcttaacagctgcattgtgactgaaaggtgaaatgaagagaccctggcttccacagctctgcaggtcatgtgttcactactctggaacattcacttgcaaaatggcttttattctagtctattttagcagtagccagaatttttcataacagggttcttgctcttcacccctacatcctagcatctttagtaaaggaaggtacagtgcatgctaccaaaagagacataaacacaaagcaagccacaaaccctaatttgatctacactggaatcctgcctgaaagatatgctaggataatggtggcccaacttgtgggagtaaacaaccaatatctgatttgactccatgagatggaacccatacctcacactgcttgggtgactaagaacctgagactagatagcctaaatactgctctgtatgagggggtagcaaataaaatgactcctaatgacagttatactcatagatcagtgccttactcagtcaccatcagagaaggttccacctacagccgatgggaacaaataacagctagatgttatgcagagaatgaaagacctgggaacactcagtcttaaatagcatgtccccatcaaattcctcctcttgggaaccagggaaccctgtggaagaggaggaggtagaaagagtttaagagccagaggggatggaggacaccaagaaaataaggccctcaaaaatcaacataatccaagctcatatgaattcagtgatactggggtagcatgcagagggcctgcattggctgtaccagggactctgcatatatattatgaattccaatttagtgtttttatgggatttctgagtgtgtcaacaagtgggtctctgtttccagtgccttctcctaggctctttttcttctgtttgtcttgttcaactccaatgtattagtttttattttatcttatattttatttattatattttattatcatcccttaaaagtctgtttgttttctaatgagagagagaagaaagggagtggacttggatggaagagcagaaggagtggagctgggcagagtggagggaggggaaactgtactcagatctattatgtggggggaaaagctgttttcaataaaaggataaacaaaacagagagctagctgttagaaattacatcattagtacctgtgatttgattggtttcctttagggtaacaagtggcagttagagtttaatttaataggaaaattacttgagcaacaaaattccatagaatcttaaatgagccatcaggcagaagtttctcttctaaataataaaatataagagtatttcttttcatagaaattacataaattgccaggccatggtggcacacacctttaatcccaacacttgggagacagaggcaggagtttaagactagcctgctctacaagagctagttctaggacgtcctacaaagccacagagaaatcctgtctcaaaaaagaaaaaaaattacataaatacatataagatacaatgaaagggccattctgcctgaacacttactattgcttaaataatatactaagtgcccacacagaaaatcacaggtgaaattgtcattagtttcaagaatagatgtacccatttccctctacaattattcaagtgaggcagagtcaacaaagccaatctttgaggaatctgtcttccttcagagagaagcaaatacactctcctgagaccctcattccctcacttccatcccaggatgctctgtctattttcccctcatataattaagcagcaacatttgtcatggaaagattatcagggtgagattatcagccctgttactcaagattttcctccactcccaccaatacttcagaacaattcagcaatcttttctcccatctccaatacagccagtatgagtcagggttatttcccatatttgaaagctaaccaactatatttggagaagaatttactttaagatttcaaggaaacttgagtagatcaataatctgagatgtaactttctatcatgatacctccatcatatgaaaacagtaactttttaattgaagagaaagaatacttactctttgacagtatgtgaaactcacaatgtctgggttctaaaatagagaaacaggtataagagaaagcttccatattcatcaagttgactatgcaggtacaaagtcatagcattctcacaggtgggcaaaggtgtaactgaactttaagtccatggagcagggacacatctgcaaggctggacttttatgcctataccttgttagagagactgttcacaactacacaaatgaataggaggctaaatagaacaaaataagtctgccaagtgtgctcatacacatctgtgttccctacttaggaagcaaaattatcacaaatttaagcctagcccagagaatgtttcaaagctctcctttgcttgccaacccaattgtatctcctgtgccccacctgtacaaaactaaagagtacgaactcatcttcattgctcttatttttatttctcttatttactttattttaatacaggcaggaatgtgtttccttgtggtattttcgcacaaacttgttttggttgacaatctctgcatccattcctctcctctgtctctctgcctctccatttaagtttaaagcattcctcatctccaccctccttccctttcatagcacttgagtcttgttaccccttgcactattcagccttttcacctctcataggtcctgtactttggtatctacacatactcactctaacataaatgtacagatgtaaaacatgaagcctacacctgtgtattacagagaatgcagcacatgtgtctttcttagccttggctacctcaactgacatgttccagatccatccatgtttccacaaacttcataattgcatttgttcttatatccaaataaaatgtccttgtgaatatgtagcacatttttattatccattcatgtgctgttggacagttaagctaattctatcccccttgctactgtgtacagagcaacagtaaacatagatgaataagtgtcacttattcctaagtggtacaatatgggatgtttaaggtacatgtgcagaagtggttcagtggtggtgtcatatggcagtttcctttgtaggtttctgagaaatctgcacactgatttccattgtgcctgcattaaacttccccatacccacaacagcacttggctttgttttcttgataatggccatccttactatatttcttctgtattattactctggatcttgtttagattaaagagcatcattgaacttaatggaaacatagcagtattgttttagattgagtgacaggtatttctaaagaaacacagggagaattgtaggtactggaaactaaccaaccttccctgtcactaagagtactacacaaacacatggagaagtaaagtcactcaaaaactgaggctagaagaatcaagaaatcagggactacttagggactactgtctatgaagaaaataggcctttgaaatgctagttgaacagttatgcctgtatctaactgttttgatgttatgttgtattcctgtttgaaattgccagacatcttcaataatactcaatagaggaatctaaaatggctgaaagacacataagaaagggttcaacatccttagccatcagggaaatgcaaatcaaaacaactctgagataccatcttactcctgtcagaatggctaaaatcacactcaccaaggacagtttatgctggagaggatgtggagaaaggggaacacttctccactgctggtgggagtgccaactcatacagccactttggaaatcagtatggcgactcctcaagaaaatgggaatcagtctaccacagactcagtaattccactcttaggcatatacccaaaagaagcacattcatacaacaaggacatctgttcaatgatgttcatagcagcactatttgcaatagccagaagctagaagtagcctagatgcccctcaaccaaagaatggatagagaaaatgtggtacatttacacaacggagtactactcagtggaaaaaaaacaatggaatcttgaaatttgcaggaaaatggatggaactaaaagaaaccatcctgagtgaggtaacccagtcacaaaaagacaaacatagtatgtactcactcatgtgtggattttagacatagagtctaaatccacacaatccacactgccagagaagttagtaaacaaagtggaccctaggagagacacatatggtcccctggagaaggggaaagggtcaagatcccctgagcaaattgggagcacggaaagaggggggagggagctaagagaatgagaaggggagaagaggagggatgcagaggacatgagggaacagaaaggttgagtcaggcaaagaatagaagataacaagaatggagataccataatagagggggacattttaggtttacagagaaatcaggcactagggaaatgtctggagagctacaaagatgacaccagctaacaatctaagcaacacaggaaaggctaccttaaatgccctcccctgataacaagattgatgactgacttatatgccacctgatagccctcaggcagcagctggtggaagtagaagcagacacccacaactaatcactgaactgaactggaatccagatgcagagaaggacgaatgaagagcaatagggtccagaccaggttggtgaaacccacagaaacagctgacctgaacatcagggagctcttgctccccagactgatagctgggataccagcatgggactgatccagacctcaggaacatgggtttcagtgaggaaacctcagaaatctgtgggacctcctgtagttgttagtacttatccctagcacaggtgtggactttgggatcccattccacatagaggaatactccctgagccaagacacacgaagggaagggcaggccctatcccaaagaatatgatagactctgatgacactctatggtaggcctcaccatccagggtgagcagaaaggatatgtgatatgtagggttttagttagggaagtggtagggaggatgggagggacaagggaactggcattttcatgtaaaacaatcttatttctatttcaaataaaaaatctgcaacaaaataaaataaaaaagaacatcgcacaaactcattaaaaataaatctcttggaattataaccaaagcataagactaaatgataagatgaacctatcttcatttccatgaaaacctcattggagaaaaaaaatcatctctagaaatggtctttaaaaatgtggaagaaatgttacagtaaaatagcaggcctcagaaacaaaaactgaaccagcctcagattcctagttatccctttaaacatactgtattatagatccatgaaaatggtaggctgttttcttctcggcggagccgctgagcagacccaatgtagacctcaatggagtaagaggcccagaccttttttccggatcaatgccaagtgtcaggaactctatcacagggaaggaccctgtctctgctgcaggactccagatccagtgcagtttctcctgccagggacctccctggcttctaacagcctgcgctcagaacatgcgtgcaatggacatctctgaatcctcaccgctaagtctctgcctccagtttaggagaacctctcatattgtcagcctcctcaaccatttcctagacattcagaactcttcagcctcttcaaatatttcctagacattcagtaacctgtattcctagatacatttgtataccattgtgtgaaatgttcatgtgtaacctaactgccccgggatattagtggagtggttaagagtgaaataaaagaatcgtgattgcctatggccagctcgcaaggataatcaggtgtactcgtcagatcgtagccaaagaaactgacaaaggctgtgaagtgattggctatcgtggagacataatcacattctgcttctctgacatcgtgcagagaacccgggatcaccacaccccttctcaccctccaccttccgcggcccctcttggcacaccagcccgaaaccaagtatccccaaccaaggatgcaaagatgtgaccccagacaccatagcaatgagcgctcagcagggacaggactgcaactctgcctgctgacccagcaccacccagcgggactagagcagcatttggctctgcggaagcataaaagactgagctgcccttcattatgaaatatgaagtatgaattatgtaatacaaatcatgaaacatgaaatgtaaactatgaattatgaatcatgaattgtgaatcaagaattatgaattatgaactgtgatatatgaactaataattatgaattatggaacatggattgtgaatatgaattataaaatatgaattatgaattgtgaattatgacatgtggtttatgaaaatgaaatatgaattatgagttatgagctatgaattactaatataaattatgatttatgaaatataaattattaatgtgaaatatgaaatattaacttttattatgaaatttgaaatatgaatatgaattacaaaataggaggaatgtcatgaaatatgaattaggaatatgatatatgaattgcaaaatatgagataaattatgaattataaatatgaaatatgaattatgaatatgtgatgtcaattatgaattatgaaatatcacattttaattatgaatattaattattaattatgaaataggaagtgctacttattaaagtatgaattatgaatatgaaatatgccttatgagttatgaattatgagttacaaaatatgaaatataagataaaatttattaattatgaaatatgaattgtgaatttgaaatatgaattatgagttatgaaatatgaatcatgaatatgacttgtgagatatgaggtatgaggtatgaaatatgaatcatgaatattaattatgaaacatgatgcatgagctatgaattatgcattatgaaatatggattatggtaatgaaatatgaattatgaatatgaatcatgaaatcatgaatcatgaattatgaaatgtgaactaagaattatgaaatataaagtacgaattatgagatgagaattatgaatatgaaatatgaattctgaatttggaatcatgagatgtgattgtggaatgtgaaatataaattgtgaatttaagttataaattatgactcaagaattatgaaatatgaataataaattatgaaatatgaagatgaattacaaaattcaaaaaaagaaaatggtagatcattatatagatataaatatgtctgatgatatggaagaaaagttcaagtttgatggcaacagagcagaaggaattcacctgtgactgaaaatccaatatagaatcagcaaaaactggaaattccatatgcagagccatttgaggcaatgtgtataatctaagaaaatgtgtaccagagacttagagctggatcagctggtgaagtgtttaaccatgcaagaaaaaggacaagaattcacatacccagacttcacagaaaaaggcaggtgtgccaccatgtgcctgtaccccaagactggcagggagagacagagaaaggagcatcctgggacttactggccaacctaggcagcaagttctaggatccgaagaggccctgcctcaaaacctaaagtgaagaggtatagaggtttgattggctctttctcctccatctctcacccatctgcctgtccccatccatataaaatcaactgctccaacataattagacagaacaactaagaatttaccactcactcataattgtataaggtatctctcccttggctgtattaaattaaactcagaaagcttggctccaagccctggattggtcatgaatggacattatctgttatcttcatttaacctgcagttacctgagtcatgttcctctcataatgaagatcaggaagatgaaagtttaatcatgtgacttcaagcctccatgaaagcatagtgtctaaaatccttgaccaaagcaagccatgagaccaaaacagtaccatgaatatccattctagagttaacttaactggaagctccaaatttagagctaaggtgatcacaagctcacagcacttgatgctccacttaaggcaacctgcatagtctaagaaaatgtgcatgaggaggacttcctgatagtaattttatgcaccacaacaaggaaagatctctagaggaaatgaccaagttgcaagcttgatatgtgaggacatctggaactatagtttcagaagactctttgaaagattaagatcaatttcattcaatacagtttatcttcctttgggaaagatcaaggacattttagagtatagaatgtactgtctaaacagcaatgaaagaagaagttgtgttgatcaaattcaatgagcacacagatgataaacactgcaacagactaaggaaagaaagaagatgccctggagcttgtctgtgtgaaacagaacacattgaagtggggatttggtctctggtctcaaaggagaaacagcacttctcaaagaaagaatgtgggcaagtggaatgaatgtgggtggtggtcctgtatacttcagatgacatgaccaagaatcagaactcacacctttgcaattttattatagtaattaattcctatatatgaatgtgacccttggagaagatctgaataggctccagttccaggaagctgtggttccagtttgggagcaataaaaagcatgtgataactactaatatatgtcaaaacatatcatctcaaattattcacttcaagggaaagtaagccaagctctaagcccatttcatatgggaaaactggaacagaagaatttcacttttaccagtaagtgcatgacagaaatatagacattaagcccagttaccagccattgtctgaaatcaccagggacgcacccacaggctcactgccatcatcatcatcaccatcattatcactatcaacattttctgaatcctggaaagtatatccagtgtctaacgtatttgagctcaataaactccaagatgagcaactcaaagttggtgttacttatttcatgagaaaggactgtagtagtactttctcatcaggactatcaacccacacagagacttagtaattaggaaagctcagccttagtttaggctttttcctaactagctcttacaacttgaattgacctgcttctattaatctatactctgccacatggttcagttacctctaccctgtaccatatgtccgacttctttagtgtatcctgatgtctctgcctctcttcttcccagatttctttccctcctgggaaatcccacttattctctccttccactggccatccaaccaatcatagtgacacatcttcacacagtgtaaacaatattccgaaacaaagaagggatttttctaagaccatattatctgtaatttggacaaacagacttcaaactcagaattaacctgatgatggagaagatttaggtttgaagatttaggtttgatctactgaacatttcctgaacatatacgatcccatgaatgcttgcatttgtactgtagttgggattggccataaccaaagacacagatcaagttttaactaaatccagaagtccatataagcatatgaaactaaggtgtttaagaagactaaaatcaaattgagtccccaagaagggcagttgcctttcaccgatagtgtgcttttgttgacagtaaacatcaaggtaaggctatacttggcagctttctctgacagattcaataatatgaaatgtaaatgccacagttaactgaaataaggattctataagtcagtatttggcatttggatagtaaagttatgagggaagtctctccaaaaacctgtatttgatccttgctcaaaagaaaaaactaaaacattttcttggctgctttttttttttcaaatcctgcaagtcttacaagtacacaacaaatttgataattcatataacatgagaaggaattagttgtggttgtgaaatattgactgtttaaccctggcagtgaaaaattaacattcttattccaaagaatacaatgtggaaattgcagaaaagaacaatttttctaagcattcattttaaaagctgtaaacttcagcagggaaacgcattcatgattctgctgatttcctgtttccctagaaacttctttattaaccaaacatttcacaataactataggtagattgcaactcggacttctctattttttccacatttttctttccagtcaatgtgtttctgagtttcaccctagataaactctcctgggcctctccaaaatctgattgttccattcagtgctgctgctaaccaacaactttaatcttcccatagctctactttttttctttcatagatttttcttggtgccaatttttcttggcagtcaataaattatattgccatctaaattgaatatcaaaaatatttttctatggcattttcctattgtatagggtgtcctggacagaaataactttcaacaagtttgtaataaattcttaaggcaaagttcagacttttttcttatcattgtacttctttccacattcaagttataaacagaaagcacaacaaaatggccctagactatgacctcttcaaccatggcttatgaggttgctcatttacaactttatgtattcatcaacactcactcagtgacaaaagatcgatgctcagcttgagctactgtactaaagtatttgtgttattgctcagctgaggcagaggggtgcaactggcctcaggcaagtctgaacatgcagttcaaacattcgggaccctatgagagttccatctatttccactttctctttctgtcacctccctcacccactctgcagagcaaatatttccttttctgtctttttttcaactatgtatccttggctgtcctgactcaatatttaggctatccccaaattcatagagatccccctgcctctttaccctcaagtaatgagatttaaaaaagtatatttgacttttttccaagactacagacatattttatttatatggataatgataatggccattaccaattcttaatttttattcatatactgaggtcccaaacacacagtatgggatatttcatagctatttttatctgttttgtatgggtgctgaaatattatctgctttgtatgggacatgagacattatgattggctagtcctgggttctagttttgaagaacacactggattataggataaccccactatatttgtggaactgaatttgttagattctccagataagcattattgaacatgaataataaatgcttcttacgacattccactgtaagcttctaaatatctatgtgcatttttttactaatgcagaacactgttatactatcactcacaggaagacaatgaaaacattaattaaagggtaatgtcatggtttagacatgatgcttcctccaagacagttcatacaccaaaggactggacccttatgcaagttgtgttcaggagctgattgaagatgagggctttgaattcatcatctgtcaatgaagtcctaacttggtgccattattgagcagagacagagagggtgaagcttagctggatgaagtagttcaatggggtcttgtctttaaagggtaatgcaacctttgttctggcatgcagtgtaaccctcctttgcttcatggttgatgtaagtcaagtattgctgctccaccagcctccagtcaccaagatggcatacctgaccacatgcccacagctctagagccagttgactgagtgaaacccagaaacaatgacccaaattaaatttcggctcctttcagttgctatacctgggtatttcttctcaatatcagaaaaaaattaacaacataggtaagaacacacagcctcaaccaatacagtgtccaacagaatttctagcattgtgtaactactataccctcaccacatttttgatgtgggataagctgaaacagagtcaaatggatagatctcaaaaataagcatcattgtgaattaaaaagtgactacaaggtggttttgctttggctcaaatcaattgctatttcttcttccctgaattaagctgaattaccaacagagctaagaacaacaaaaacaatagacatttattgaaagtgccttattctatatccccaagaacaacataaaacatgcattccaagagcagagagatagagaaccaaagaaaaggatgagccagacaaaaactcaggttcacagtgaatctcattttagagaacaatggggcttggggatatagtaaaatgggtggaacacctgccttgaatgcacgatgaattcaagcctagtatcagggagggaggaaatgatggatgacgaatagatggatagatatgtgtatgtatgtatgaatagatagattgagatagatagatagatagatagatagatagatagatagatagatagatagattgacagacagatagatgaatgagaatattattgagacaaacagagaaatggagaatggctgttgtcatgacagttttctcacatggcaatacggaagtgattagtctcttgaataatcttgagtagtcaggaataggtattttcccttccaagaatatcaacccatgaagaaataatatttagactaccaaccatgaagaaatgatattcagtaagataaaataaagggaacctagtgcctagaactagtgccatccaaacaaaatgagtttttctaaagtaatgaatgctctaaagaaatctgtggccagactgagggaattaggaattctctctgtcagtgcaggcactttgaggcaatggacaattatattatatattaagtattcactgactcctgttctcccaacttaaatttctctgcattataagtctttaatcactatatcccatcaattgacttgatgtttgacaacatttgctcacaactaaagccatagttcttacaggatccagactttaacaaaaagtccttagtatcttgccagtgtgttcaggcattttctcttttaaccttctacaaaagctcatcgatgaaaccatggcccatctgcccttcactccagattagactctagtagatgtggctttgccatgggagggatcaaagcatttatacgaaaggtttaacaaggaacctgcctgcaggagattccccttccatactctggctctgtattttaggtcctgccatagttaccaacttcctccttcttctttcacaagttacaaagtaaaagagaagacataaattttgcagaccctcatagctttgtggtaatcctacccacagatgtcagaaaatactggccccaggaagaaaagggttttaaagttcaatgtttctttttcatgcttgtttcaaattattcaaccatacaaagaaaaacttaaaagattttctgacactaacagttagatttggaggattcatatttcagaaccctgatctaaatcaagtatggcaggctattttaatatgtttcttattttgttaaaataaagaaccaagaatcttcatatgcagagatagaagaatccttgaagtccctagcagtttaggtaatcctgaactaaacttatcaccatcaatgtttcttcacaaccacccaccataagttgccaagaaggtaaacacatttcttcccactaatatagaaaactgtaagttaaaccatcacctgcaaaaaaatacaacaatataatatcaagtagtttgtaatattagggtttatatatgaagttgctccatgatagtttggaaggattggttcttcatgaaacctgtgttcagatgtttggatttttgcaaggtattggatgataagactttggcatcatcatctatagatggattcctaatttgttgtaatagttggacagtgccagagacattgggaagtaggaattgattgaagaagtagatcaatgggcccacaccctggagtagaccactcacatccatgtgagaacatctaccaccactttaacaaacctgttacttgcaacccctacacctgtcaatgtattattgtttctacaggatgagaacacaactccaagatctaaataacaaagggtgctttgtgctttctatacttaaaattcagcacagacaactgtaggccaaagtttgaaattcgtttttcaaaatcatttctgtctttgtctttggtctgtctctgtctctctctgtctctgtgtgtgttccactctctgtctgtctgtctttgtctctctgtctctctttgtctatctgtctgtctgtctgtctgtctgtctgtctgtctctctctctctctctatctctctctctgtttgtgtgtgtgtgtgtgtgtgtgtgtgtgtgtgtgtctgccctgctctccctcctccctgcctcccatcacttggcttgatgtttcattctctgtgcaggaggattttcttcattatgctcaggaaaagatccatcaatgattccaagtttttgatgatcattctcagcagctgcagcaagactcccttcttaaatgaaaaaaaaatacattttagccctgaggaatgatattcatacctcacattggcagacagacaaatgttcccctcaaaagatgcaacattcaccatactctgaacataagctcttacatggcaaagggtgtctgcaaatgtgtggttaaggattgtgatatgtggaaatcatcctgaattagattgagagattcagtataaatctgtgatcagagagatattgatttggttcagttgctcagttcacagcaccataagaataaacagtaatgtcaacgacaacaaaaataaggtaagtgagccaggtgttggtggcacacgcctttaatcccagcactcgggaggcaggtggacctttgtgagttccaggccagcctggtctccagagcgagtcccaggataggctccaaagttacacagagaaatcctgtcatgaaaaaccaaaaaaaaaaaagtgaggtaagtgagaaagacagattagtatatcagagtgatggaaaaattataaagatgtattgccttttaacccaagctaagatgcagggtgttcttttttaatatattttcatatatttgaattacaaacaagattgaattacatcatgatcccagttcccttctccctcccttcctcctctaccccccccccccgaactaaaatcctacctgtcatatgtcttttcttctattctacacctgactcaaaatttctgcttcctcatgacctctgcatccttcctttttttcccttctctctcatagcttgctcccctgtcttcccatgttctcaatttgctcaggtgatggtgacactttccccttctccaggggacaaagtttgagtattttagggtcttctttgtttactagtatctctggcagtgtggattgtaggctggcaatcccttactctatgtctaaagtctacatatgagtgattaaatatctcgtttgtctttttgtgattgggttacctccatcagaatggtttcttcgagttccattcattttcatgcaaatttcaagatttcattgtttttttctgctgagtagtactccattgggtaaatgtaccacattttctctattcttctattgaggggcatctagactgttttcaggttctggctattgcaaataatgctgctatgaacatggttcaacatatgtccttgttgtatgaatgcgcttcttttgggtatatgcctaggagtggaactgctggatcttgtggtagactgattccattttcttgaggagtcaccatactgatttccaaagtgtctgtatgagttggcactcccaccagcagtagaggagtgttcctctttctccgaatcctctccagcataaactgtcattggtgtttttgattttagcaattgtgacaggagtaagatggtatctcagagttgttttgatttgcatttccctgatggctaaggatgttgaacaatttcttatgtgtctttcaaccattttagattgcactattgagaattgtctatttagttctgtacccccacttttaaattggattgtttggtgttttggagactagcttcttgagttcttggtatattttggagatcagccctctgtcagatgtggggttgatgaatatcttttcccagtctgtgagctgtcgttttgtcttgctatgtcctttgctttacagaagcttctcagtttcaggaggtcccatttattaattgttaatctcagtgtctgtgctactggtgttatgctcaggaagcggtctcctgtaccaatttattcaagggtatttcccactttatcttctagtaggttcagtgtggctgggtttatgttgaggtctttgatccactttgacttaagtttgtgcagggcaaaaggcttgtgtctatctgtagtcttctacttatttacatccagttatgccagcacaatttgttgaagaagttctctttgttccagcgtatatgtttggattgtttgtcaaaaatcagatgttcataggtgtgtgtgttaatatgagggttttaaactctattccattggtctacctgtctatttttgtgccaataccaagctgttttcaggactatagctctgcaatagagcttaaagttaggaatggtgattcctccagaagttcctctattgcacagggttgttttggctatcctgggtcttttgtttctccatatagagatgagaattgttcattcaaggtcagttaagaattttgttgggattttgatgaggatttcattgaatctgtagattgcttttggcnnnnnnnnnnnnnnnnnnnnnnnnnnnnnnnnnnnnnnnnncctatccaagagcatgggagatctttccattttctggtatcttctttaatttctttctttagagactcaaaattcttatggtacaggtctttcacttttttggttagtgttactccaaggtattttatgttgtttttggaaattgtaaagggtgatgcttctctgatttctttctccaccaatgtgccatccgtatatagtagggctacagatttctttgagttaatcttgtatcctgccactttgctgaaggtgtttatcagctgtaggagttccctggttaaattttttgggtcacttatgtagtctatcatatcgtctgcaaatagtgagagtttgacttcttcctttccaatttgtattcccttgatctccttttgttgtcttattgccctagctagaacttcaaggacaatattgaagagttatggagagagtggacagccttgtcttgtccttgattttagaggaattgcattgagtttctctccatttaatttgatgttggctgttggcttgctgtatattgcttttattatgttgaggtatattcctgttatccctgatttctccaggacctttatcataaaggggtgttggattttgccaaaggctttttttggcatctagtgagatgatcatggatttttttcctcagtctgtttatatggtgaattacattaatggattttggtatgtttaaccatccttgcatccctgggatgaagcctactttatcgggatggatgatttctctgatgtgttcttggattcgatatgccaatgagaatttttgcatcaaggttcatgagggatactggtctgtagttctatttcttagttgtgtctttgcatggcttgggtatcaaggttactgaagcctcataaaaagagtttggtaatgacccttctgcttctattgtttggaattctttgaggagattgatattagctgtactttgaatttctggtagaattctgcactgaagccatctggccctgggttttattggttgggagacttctaatgactgcttcaatttcattagaggttataagtctatttaagttgcttatctgttcttgatttaattttggtaagtgaaatctgtccagaaaattgtccatttcctttagatttttgtgggggaccgattattgggccccaggttctgtctgtcagcagcagtggtgccaggaaactcctggccactattgtattgctagtttgaccttatttttggttcagtctatttggtgttctataggcttcttgaattttcattggtatgtctttctttaggttgggaaagttttcttctatgattttgttgaatatgttttctgcacctttcagttggatttcttcaccttcttctatacctattattcttaggtttggttttttcatggtatcccatatttcctggatattttgtaatagggatttgttggacttaagattttctttggttgatgaatctatttccactagtgtgtcttcaactcctaagattctctcttccatctcttgtattctgttggttatgcttacatctgtagttcctgatcgtttactcagcttttctatttccagcattccctcagattgtgctttctttattgtctgtatttcagtttttaggtcttgaactgtttccttgagagatttattgatatcttgtattttttggttagttttttcttccatttgagggactttctcatgtcctctttgaggtactctatcattttcatgaagatgcttttaagtcattctcttctgattcatctgcatcatgatttttaggtcttactggtgtatggttcctagtctccagtggtgtcatattctgttttctgttgtgttctgatgtgtttttacctagtccttttctcatcctttcttctggtggttgtagcaagagtttcttgttctcctgatgggtgtgggaccaaggttcttttctggtagatgcaaacagatccaatactctgatgtcggtctttttctcttggatggaggtgtcactgttaccctggtgtcggcagtgttcgggtgtgccggtcccgccaggccagcagttcgaggcagaactgtcccgggccttggtgtgtcggattctgcctctgaactcaatccggcaagcaggtcgtttgtgacagatgactctgagcagcaacgactaacaggaactggaaacagttcctggcctacctgggcgggtggatggagtccgggctgcctctgggtgtttggaacctgccgatgccgaactcagtccggcaggcaggtcacttgtcctgggtgttctttcagatagaaggcagacaggagataggctgttgagaaattgaccaagaatcccagatctgacccaaaaaagggtaaacaacttcttgttcaactagatctaagcaaatgatggatctggaaagaaatatgttaaggtaagatcagaatgatataaaagagcagaaacgcagctcccatgggcccagcattcattgggcagacccctcatctctgtgcatacacataccttcagtttagtaaaccacacttggtgcttctttctttacatcttattgaagttgtttggagagcacaggaatcaatagcatcccctaacaagaggaccagaaaaagtccttcagtttacactgccaacagccagtggagaagtccagactaactccacattgcattataatcgtgatgtcatttaaaccgttacgtttgcttattactttcacagtccttttctttttaattttttcagaactttatacatgagtattgtatttatatcatttctattcctcattctctgctcttcacttcctcccaaattcatgatctcttcattatcattgttatgatacatcacgtatatgtgtatgtcacatacacacacacacacacacacacacacacacacacacacacacacaaacacatgagctagtagtgctcaggaaggaggcttccaggtcagttctagatagatttccccaagcttagacttctcctattctaggaattagggaatgtgaatttaaattacattagaatttcatcaaactcctcatgaaaatagctaatatcgagaaaacaactgacagaaaatgctggcacagattgagggaggtggaactcattcttggtgggatcctgagagtcattaagaggtgccttgatggagaaagcagtacacagttgtgaatgtctaactggaaaacttcgaaagaatcgtcatcactagtacagagcttatgctgtcataggactaacagaagtcagttaggtctagtacctcattaacagtctccacaaatcacttttatagccaacctatatccagtgtgatactacaaaatgccatttagaaagacaagtcttgactcccttatattgcagcctagcattgcagacactggcaagattaatttttactcatgctgaaatgagtgcaagcaaaactctaaaagccacttcaccaatagctgactcttccaggcaatgggaatgcctgcagacatcccaagttcatatcactggtacaatcaaagctctaaaaagattgcagcatagcagaagctacctggttattaagagataactacataaggaaatgaattcttagttctgaatttaaggaaaagaggaagccttctggtttactttgattgtatattaatttcttataataaagccacctgtgggagtgaactgaaagagtacactgatgtgtttccttctctgcaaagtagaaaataagaattctacatgtgatctgcttaatggggatgtgttcccactgatcttattactgtttaaagaaggcagggtgactttgcattctcaagagcagtgatgggacctgttagtgttcttttatggatatcacagtctataacccaacaggtgttaggaagaattcaccctgtgctgaagccccacaattactcatccaccactaatacttgcattgaaatgtaaaattcacagtcaaatctaaacaatgcaataaaacaagaatttagttgtcttcctgggtaaaaccattcccagcttaagtggtttggaattctctaaggaagacatttttaacagttcatttgcaatctcaacccagccatttcctgtatggaaccaaaataaattttatctgaactagtccctcttattgacagataaagctggcccaaagagcctctgcctatggtgaattaaactggcttgatgtgttaattttaacataaccagagagtatagcctgagactaagctcatacatggagtaaaaagaaacaaactgattctaggagctcagaagaaaatggactattaacctgagagaaagaatgagtttgggaaggccaaatgttccagtaaatggttgggacttgtacttttttgatatttaggcacctaatgtaggcatcagatctgctgctgataatgaagcattagactgaagaaccagtacaaactggcatttctctacctcgggatcattttaaggatgctctttgatgccacccaggcatcacagccctaatgatgcaaaggaccagcctttgcatgatgtcatcaggtacaaggtagaacaagataccaataaataccaccaagaactaaaaagacatctctcatttgctttataaattccccattaacgaccccaaaacttcatattgctatgaaccccagatgtaagaaagtaattgtaacaatacagagatattttttcaccacattagcaaatgggacttgagacccaaatacaagctaattttgaagagtaaactatttttcctcattttttcctcaatcattgggaggaattttttgcttgcatcccattgagatcttacttaagattactggaaatcattttaataattatggtgtcattatctattaaaactcaaatagttgagcttatctgtttttaaaacatagcccaaaccctgttgggaaacaaaaaggagacaggtacataatgttaacagcatgctaacagtaaagaagaacaacattatgaacagaggcactggcccatgctgtgacacgatttaaagacaggctttataagtgatcaaaaaaacccactgtgggtagaaattgagtggcagagggttcaaaaaggaaaagacaaaagcacaccagagaggattgttttcaagtcctatttgtcaagctctgatcttctaagagacattttcttgcagaaggaagaggagaaggataaagaagagacagagggggcacttggtggcaagcttagatgtacagcaacactgctatgtcctaaatatgaatataaactcagacatgatctattatttaaacataaaaagttgtgcatcttaaacttgtaacagaaacagtgaactcaaggaagatgatatagagatggaatcaaattccacagacaccaattttaaaaggcaactgaatcttggaaatacccatttcccagaagatatatctgcaatttttgttcaaaggccaagctgttagcacatcatacttagaacctcatgactcagagtattacagcacatggagtgtaggactgaattgctcagttacctaaggatcatagatccagcttcttctgtcatggtgaaaaccacaaagcaatacaaatcagtttcttgaatctccatccaaatgaaaaattaaaacctgtctacactcaaccaaagctcaaggttgactgaggaaattttggcagcaaaacatacatattgcttatccaaaagaaaagaagggaggtgtgtttggaagccatgggccatgtcttgccaattctgccagatggtaaggacacaggcagtaagaagccatggatgctctgactctccttgtacagactccccaacagctcactgcacagcagagtaaacttggagccatggcaagtcaggtgaccccttcatttactattgctgttatacctcgaaaacacacagcacaggctgagtacatgcaagagtggagccaccagaggccgggctggcaatgctacttgaaatgcttagttctctgctttcaaagtaccagatgagcatggcatactaactacagtgttgcagggaaaatgcacattgacaacagaagatgttgatgacacacttctaggtttctttgtttggagcagttataagctgtctctggagctcagagacaaacaatttagtgatgaagacacaatgctgatggaggacttaaaagtcagtcttctaacttctctaaaaaaacagctgcctgctactccccaatattccttttgcagaattcccctgcccatctcactccttcctataggagtcaatccccacacccagacttctggggcctcttccaccttaagtgtagccatcttatcaccctgtataaggttttttctgattaatatccatgtgtcatgaatgaagatagcatgtttaaattggtagtttatgcctattagctgtgcaaatgttcgatgccaacacattatgcctgacattcctatcttcctctgtggttggtactgcctttggtgaactggatatgagtcgagcattgcaaaacacaagcagagccataattatgtttgcaagaagagtttctataagatagcaacagcaagccttcttaagccagaagctgactgggatgaaaaaagcatttgagctttgaaaatgacagtggttgccagtgctaataaataaaatagaagagccctgtggaaccagcttttctctgtggaatccttatttataattaagacaaagctgatgacacagaaaagcttgaggaacaactcaagaaaaatatttatgttgctagctgatcattgctaaatcctggcttagtagaatcttccagaaaagaagaaaaagtatttctcagagcttgtaacactggtataccatgcactgtctagctaaactctggtaaaggtaaagtcaaacagagcagtggacttctggaagacaaaacctgtgtgagataaatgttttccaagccagtgcagacttgagtaggcagctttgggacaatctctgtacatcgtgcaacgggtgcatctctgtgtggttatctagttcagcaatgaaaattattgggaatcttgaggtgtaattacttttctgaatgagatactaatgctaagtggtatcaatttaatctaatggaatagaccaattccaagaccactatggctaatttgccagcttgatagcatttagaatcaatttgtagaaaagtctcttggatggctgtgagggacattctagattaggttaacaggaaatgggaagacacactgttactgctgtaaatagaaagaagagtgaagcactatggttcatcactctcccttcctgccttcaatacaatatgaccatctacctcaagttcccatagtcatagctctcccaccatgactgactatatcctggagatatgagctaaaataaagccgtccttccttcctacctttcttaaattgcttttgttggagcattttgttatagcaaatataagaagtatttgtgagtgttttgtcaatgcatttaattgtaccaaaattagtaaatagtcaactcagtagtatactcatgaattgttggtatggatagtccaagtagctcttaaaacaatatatgtttttgctctaggttgcctcctgaggaaggcaatccctattgttgaagacaccacagtcttaggatatgggactaagatgattcaagctggatccacagtaacaggaattgctatgcaagtgccacagggagggaatcagtcattagtgccatcaagctgcaatgcctatgaactgcaacagtgaccagaatagcaagatatccttaaatatgtgacagtggcattcatatcctggtggtagcaaagaactgtccaaataaggcctactcaatgacagggaaatgaagtcatgtctggtactagaaatacagccaactacccaatgctagagatgtattggatattagaagaaaaactcctaccaacactttactagatgaacatagctcaatcctaaaaccctcataccacagataagtgtagctactgcccctcatcaaaaagaactgttctttattaccaatggagacattaaagaaaaccacaactggacacaatgcagaggtcaaaggattattggtagcccagccacaatggatacttctgtatcataactactgcacataaggctcgaagaacatactggaagaggaggcagaaagattgtatgaggtagatgaccaggtaatctgatctgagatttttttctcctataaatggcttcctaaacaagacccaaacaataacaatatcaatagacattaatgaagaaggtaaaaacatctcagagtgccacccttcatcacagtactataggcaacaattgacttctgagagagagagagagagagagagagagagagagagagagagagagagagaattaacctctcctaggaatggagctcctaatttgttatccaataccaagtggttagtcctgaaattatatacatatcaacgataaaaatggactaatcgtgttgcatctgtacattgtgtaacaataatcatctagcagtagtaatcaaagaaaaggagaccataaatttgagaagtgagtggggtacatgggaggagtgtgaggaaagggaatatggaaggagagggaaagggactggtgatacaatcatattttaagttcaaatatattaaaagaaaaaactgtgatacatacatagatgcataaataaatttgagagtgtctatttaatcaaaaacatcatgaaaaaggaagaactcaaaacaagaggttcatagttccactcaacagtggccagggagctattacagagaaagcatggagtcgccccatgcctcagagccgagcacctgcctggcttggctataaaatgatgggtatttctctcattggagcatggtctgatcatctggctgcctgtgaatagctgtgctcagatgttcttgaattaccaaaccctggctgttcactacaaaaagtatactcgtatgtgcagttcaagtttgtccattctgtgaggctgtgacatttttatgtagaaacttaacatataaaaggcctcacactaatcacctgcttagaactaaacacaacaacattaaaacagagtgtttaatagagacaaaattgacacacacacacacacacacacacacacacacacacacacacagtgaatccaaagaggccatgaagaaaaaagacatcacccatgtactgaggccagcacttcagacagagacagtacgcactaaagaaagttacctctttggggctatgcactcataaagagaaccctaagccaagactgtaaagattaagaaatactaattggacatggataaactaaagatggataacgcagaaaacccaacctaatttctcaagaatttcaactctctagagtctctcttagaaatgtgaagcaagatacagtaactgtagcacaggatgcaaagccagtttgggtagaggatggggaagatggtcctctttaccactatcagcttaaggatcacagcaagctattccatgtcaacctcctgcagggaagaaatgagtcctcagagaagcaaggggcaaataattttagcgaatttaatgaaaatgagataaaggagtcatagcgggaaattccatcttaattaatttttcttacactttctcagcccaagccattctatgatcacacaggaaatcccaccaaaggctttcaatttacttaattcttgaaggcaagacttttaaaatactcagggagaatatcaacatcagaaacactggcttcactgtgggagcagctgcttggggaatgatgtgcaggggctcatgagtcacatttgtaaaaagatgtcaagtgaagaaaaatgtaagagtacagaaaaatgccgatgataatttgtggaggggttgttttatttatttatttcttcatctctgctttagaatcaaagactgagatatattggatcctgctcatttccaataagtggccacaggtccataatctaagtggccacagtccataatccaccctccctgttctagggacaaggtagaatgtgttagaatcaaaaataagaatcaaatggactttgggagcccattccacatggagggatactccctgaaccttgacacatgggggtgggtctaggccctatctcaaaggatattacagacacagaagatcccctatggaaagcctcaccctccctggggagcagaaaggatatgggataggtagggtgttagttgagggagtggtaggggaggaggggattgacatgtaaaacaatcttgtttctaattcaaataaaaatagagaaaaaaagaatcaatgaaggtatccatgggcccacctggtgccactgggctcaggcacatgaaagacacacaggccagcctaggttctcatggtcctgatgatgccaggtgggtaggtgtcattaggatgagcaaatatatattggagaaatgggagagaaagagaaacatggactctgaaaagaagcagatctgaagaagcaagagtggtaagaaataagctgatgtgagtagcctactggccacctggggccagggtgatgcccaggcctgagctgttggcaaaggaccatgtctagctccattgccctggattagccagggtatgagttgatgtccatgcctcctgttaccattgagggctgtgaggatgcctagggtctggtcagccacctgagaccatattgatatcctagagtcttgctgccactggagccatacacatctgggtggcctgtgctgccaccagacccatatggtgtttagtcctaagttgctgctgagggccacgtctgggtccatgttcctgttgtaattgggggtctgtgttgatgtgcatatcccatgttacctcaggaggccagaagaaccatgtatgttgaaatccaagggccttgctgaccccccaaagcaccccaagggacttgtcctgcagaatggtaactgcaggatctccataacatggggtaacagcaggatgtctgagaggagtttcagtgagggtctagtgatgatggtgtgccccaggccttgaaccaggccaatggctcattgccatgaacatttgtgggtggggctgattgtacaaagtataacacactccagctccaaatgctggatatatgagaaagacacaggagcgagatggttttgtttgtttttaattaattttgtattaagggattctttgtggggagacactgtagaggtgagggggatatggagggactgggaggtgagcaggattggggttcatgatgtgaaattgccaaagaatcagtagtaagttatgttaaaaaaaaaaaaaagaattcactagcagcaacttaggactaaacatcacatggccccagtggcagcaaggctctaggatatcaacatggtctcaggtggctgaccagactctagtgaattcacacatggggttagggagtcccattcctgccatcaaaccttagcggttatttggcttgacttgggtgtgggctgggttttagtttaatttttgagactatgtacattttattggcctgagcatgcctaagctgacctagaacccatgatcctcctgtctttgcctcccggttactgttattactggtgtgtgcaccatcacacgtaggacttatcatcaaatcgtttttgagagatggtaactcaacttgatatagaacctgattcaagtatatgtcagtgaaagatgagctaaaatcataagaaataaaaacttatgttcacaggaccatgagggaagaaagaattccatgtggggtctggttaatgctgaaacaaaccaggtcttaagagattcatggaaatttctaacaagtcactgcaatcaatgggggaaaggttttttgttaaggaaagctctccttcttgctaggaaggagagagactgaggtggctctgtgtagtatcatgacagcttgggtggtcataaggccatatatgttacacacctgtataatcactaaaggctgaaaatgactttccttcatttcacacacacacatatgtcagtactacctcagacaacaggagacctactttagtgaaaaatggggaatgagaaacaaatgttgtctgatttgaactatcgaaagataagtggtatttctttcccaggtcttgaggcaaataattccattcccagtgtgaattaatgcttgccttttaaacaacagtaaggtttatctcaaaatctactggaagatgacctttattgactttatatattctttgttcaacaaatgactttaagcagagtatattccagatacttggtagcaggcataaaagtgtaagcaaggtctggctgtgttcttgccttgtatgaggctgcattagactgggtggcaccagattgtaacagcagtgcttatgaggtcagagtgggaggatcaaagggaaattcaagggcatcctcagcttcaaaggaaatcggaagccagtctagaacatgtgaaacacaaattataaaacaggaggacttgttatgtgaccttgagacactttcctctttacctttcagtcattggtgtgctagcttccggtttttgttttctcagactctctctgattcccactctcttgctgataaagttgaatgcttcctatagtttgtatcagtcccaaaaccaataataattaaaccaaagtccaacgcagctgattctctagtctttcaagattcaataaatggtcacaaagagtctgtttgatgagtagcagtatttaggcatatgatgcagacactaagaagtgcaaaactccttcacagcatggggcctctactagagtttagtatagtataagttgtttaaaactgaataactaaaatagaagagtatccgatgatggtaagtcttacaaagaacaaagtcaagggttgacattttaataggtgaggtgttaaggttgttgatcttcttttgaaggtcacatttgagaaatgatatcaaaaatagaaaacatactgtttactgaacttgtgatattcaaactttaattacattgttcctcatcttgttatttttttctctccagtcacctgaaatatcatactaaacaaaaatatttgtcttaaaatatttattagcagcatagtaaatactttttattattctcagtaccagactctttaaaaagctagcattattgcctgtatggagtcattttcggaagtaggagacaggcactgggtccattgttggaccataaatggcacatacagacccaaattcaggtatttctcagtctacagctgtgatcacatgaagggaaactgaaactttgacacatgggaaatctgtttttgttgtttccttttagttttggtttttagagtcagggtttctctgtgaacagccctagcatcctggaactcactttgtggaccaggctggcctggaactcagattaaaggcatgtgccaccatgcccagctgacacacatggaaaatattaacaagtctcacattttttgtttcccaaaataggatgtgctagctaagtaatgaaatggtaagcagtgtttcagaattgatgttataaaaatgagtaaacatggggagatgagcagggccatggtgcctgggaggtttccacttgagcaagatggcagtggatgctgtttcaataccctctgtaagagaggccctcacttctagatggagggggtttgtaatccttgaagagtgctggtccataaaggaattcctggggcctaaatgcatgtgagttaagagatagtgacgggctgaacaccctctgcattcttttgtgggtttgttttacataagcagcatttgtttcggccattaacttgacagacttgacacttctttatataaatatattttgctcactaaaccataaaagagaaatcagtgatttctagacctagtttataagtacagaaaatctgaaatggaaattaaataaaaccccccagttgtaatcaattcacacattgtagaaggagtgattatactctttttaataaccacaggaactaagacctctgacactaagttccttttcccaatcacagtgcagggatcacctgtgagtttagctcccagtgcctgtgctctggacatctgcacccagcatagaatacaggtttcattttctctgaacactcttaatgttgagtttcattggcagattttatttaaccttgggactacagtattttcaatctgttgttcaacccctttacaaaacccacactgttgaaaccacccagtttattacattaactgtttcatttgtcacaagagccaagatatgaaataaacctagaaatctatcaactgatgactgaataagaaaatatgagacgtgtgtgtgagattttacacagccataaagaagaacaaatgacagtatttgcagaacaatggatgaaactagagaaaccatgctaattgaagtaagccagactcataaatacaattattgaatatttgttctcagagtcaggaaatagatttatatttacatatggctgtactatatgtgcttaggttggaaggtaagagaagatgatatgtgacatcacaacagagtcagggattattttagatgaatgagaccagaaagagggagacaaaagggacagtgcagggggagtgggtcaataagaacaaagtatactgatatatatagatatatatatctatatatatatagagagagagatatagatatatataaagaaaatattacaatgacagcttcagctactttgcttactgactaaaaataaatgctttaaatagtagactatgaagaagacctatgaccaattatcagcttgtttccttaagtgttaggaagctaaagaagtaataaaatatatcagtatctcaaaatgaagaatcttaatactacaatctgcccttcactccaacccttttctcacctgtaagcttaatgtgtctcacagtggtcctgtccctttaggaccctctacactgtatatccctcttcatttgtgtccccacacagctctcatgttccacaccttcccacaccaacctaggactacaacctactgatctgggactagaattcaaagacccttctccaatgctcacacacctgtcagtctcagtcaccatcaggggtgtatgatatcactacagtgttcctgaaccccctctaagaataaggaaagtggtagtcagcctgttcctctggagtgttgttattggctcctgagtacctatcaacttgtaaaaatgaaatgctagcgagcattaagtgtgacacttttgtgaatgagaattcctggaaagatgctgtgtctgcaaatgatgactgtctagagtctgagagataaagaaaaggtgggaatggttcatgtccagagtccaaatacactttatcttggtctatctttagctccctaagtagccattccctgacctctcctgtgacaggcctagtatacagtcactaacaaatttaattttaaaaagctgacttttggaatgacttaacaaactctactttccactaatcatttggctaagaaggcatctgagacctatagctgagatttctctacatggctgtaacctgcctcgctgatatttccaccaatgtatttgattaatgattttcttcgttttattactataaaaacttcatgaaattgctttcaaactgaaacatgatatttagagtaacctaaatctgtgtacccgggccatggtgactcatgtttcactccaaaataaactatctctgatgccttctgaagtaggaattttcataggcatacataccattttaaaaatagccaaacacagggctgatccagacctctgtatgtagatgccaatgaagaggcctcggcactctatgggtcccctggtagtggataagtatttatccctggtgtaagaagggactttggaagcccatcccacatggagggatgctgtctcagcctggacacatgggggaggacctagtccctgccctggatgatatgacagactttaggggaacccctttggagggtaagcagagggggaatgatgtgggggctggtgggaggttggggaaaggggagatagagggagaagggattgacaggtgaaggaagcttgtttctaatttgaactaataaaaaaaatagtcaaaatgtcctaaaagggagctccaaagaactgagaacaccctccatccacacacagaggctatgaaactttacagggaagacatcagtatctacctccctcctcatccctaacaactttctagtcaagggttcaagacttgatgattaacaagatgagtctgtctgtagataatgtgtagaatgggaaatgtctaaaagggatactttggtctttcttctgatttgctaggtcattagtttctcacttgatgcaagcatataaatgagagttactgtacaaaaacatgatggaaatgctattttctcagaaacaaatatattagttcagaacacactggagggaaaaggcaaataacacatggcaatcttatgatatcacaatttaaacatatagaagaaaataatccaaacaactcttccacctcccaccccaacaagtagaaatgattgcagaaactgcaaagaaaaaaacaccagattgtgtggccataaaatgtaaaaggaaacaaggccccaaatctcattgccctccatgactttcctctgaggaaacctcacacttaagtccacaagtaactccctatttacagaggcaaagtaccccctccccagaagcaacttgcatgtcctgatagcagacaaagcaacatactcgactgtggttgccacttaagcttgtctcagtcaccagtaccagtacaggacttgctggaccactttcttttactttcacttcttctctttccnnnnnnnnnnnnnnnnnnnnnnnnnnnnnnnnnnnnnnnnnnnnnnnnnnnnnnnnnnnnnnnnnnnnnnnnngaatcactctacttgtttctgttacctgaataaacatttctgagataaactttccaactgaagatgaaaattctttgctcagtgagagactgaccattgagtatcctgtcttttaatcctacatgttactgttcttcttaaaactcccccaatccattaagccttcaagtgcaagctatactgagacacccaacccctttgaaactcttaaataggaaatacaattcttccatgtacttacaaagctgccactgtgtcatgaaagccaaaacccctcttacagtttaaggtctcttagctccatatccattgactacaataccacctagcctcttacaaaggaaaatggatgcagatagtacaaaatataagagcaatagatatttattccagattccctactatttctaacccaaataacatctggcttctagacaaaccaataccattctcattataataataaatttctgttccttcttttcccctttacacagatgtactctagttttcctttcctatggaaatcaatagtaatgtcatggttcaagggttgactgaagtccctacttatttcccttgggccctaaatatgaatcagaaaagtttaacctcctgaaatctttgtccaatacatagattacttgcctccctgctcaccttgtgttggcacttgtttgtgtgaatctgatatttattacaagctcttgactataatggatgtaagttttccaagaacaaatgcagttgtgaatgccccaaagaagttacctggggcacaatgcctcctgtggaggggatattctactctctagatgaacacaaactgacaaaggcttacagatttggctggctaatgtcacacctggaccctagattattccattattactctcatttctacagtttaaccagagaaaacaccttcaagaccatagtttagagttgctttttgtctgcattccaaaatctcaagcccactctatcatctttctacattcctgtgatgggggatgtccatctgtatatatgtttctcttattggttgatgaataaaacactgtttaaccaacagaggaaggaagacaggcaggataggagatgaggagaattctgggaaaggtaggcagagaggcaccgctagaggcgtcatatagaggaggatagagcaagaggttcagacccttctctgttaagataagaccatgtggaaatatatagactaatataaatgggttaataattaagacagagctagccaataagaagccctagaaatctgccaacagttttataattaatatagccaaccatgtgtttctttggggctgagaggggttgtgagaactacctagacaagaaaactccagcaacattcttggactatctgatcatatcctgcatttctccctctgctctttatgaacacaagggaaagattgcttacataccttcatccaaaaccaaaactgaacccaaagtcttattagatgctttgtcctcccattccaacatatgataaggcatttcccctttactttagttgctgctgctggctacttggttttgaccactgtggttgagctctgagttctacattcagcttctatgctccatgcagttcatactctactgcttattgaaaatgctcaatatgtttactcttctgcatacaagctctatgggatccacgtaacttcccctgtccatgctcatcatttctatccaaaccttcaccctctattctttcttcttctaactaaatggagaggagaggggaggaaagagaaggggagagaaggggagaggaagggagatgggaggagggtagaggagaggagaggatggaaggggaggggagaggagaggagaggggaggggaggggaagagaagagaagagaagagaagagaagagaagagaagagaagagaagagaagaagatccaattctccctttgctggtaaggcctgacaatgacattccagtttcccagacttgggcccatgactgggagctacttttaaaagcacttctcatgattgtttcaatgagtttagatagatttgattcctacagccagttaagcacaggaaaataagaaacatttcctattcaaataaatggtagaggcttgcccttccctcaaagaaactcttattagaatgaccctatcatcagcttgtttgctcctccctataaaataatctaaggtgaagccaccctgctgagatactctgatatttggtcagtctgatctcagttatttgcctccttacaaaaaatctggacaaaataagtcaccatacatgtatggttttaacggtgatagttgtaaataagaaaatttgatcaatataatcaagcagtataggtggccatgcccattattagcacagctgcacttccttcactttccgctgaccgatccacaactacgtgagtgagcccatgctcttacccaactccagtccaaagcatcattcacccagatctccccaggcttgtgcctgcttggagtagacatgcccaggcagggaggagctccctgaatctgggaacagtccactctaccttccctttccgccgaccgatccccaacaaggtgagtgatccattgctcttaccaactcccttccaaagccccatacaccccgatctccctgggcctgctcctgcttggggtagacgtgcccaggcagtgaggaactccctgagcctggaaacaccccagtcttacttcctgcccccccacacacacactgacccctatggaggcctaactccttcagagtgaggagactaccaagagaggcaagaccatcgagagctgtgcacattgaattcctggcccccacacaccactggataacaagaggagatagagagaccccatctgcactcactggaaaaagatatgggaagaagacagaataagaactcactcaacaacagaaagaccaatatgacaccaccagaatctagggactccactccagcaacatctgaaaagcccaacagagtgcatgaagaagagatgacctcaaaaattatctcaggaagatgatagagacctttaaagaagaaacaagaaaatcccttaaagaaatagaagaaaaagcaagcaaaaaattacacgaaatagaggaaaagacaaaccaaaaaattcaagaaataaacaaatctcttaaagaagctaaagaaacccaagataaaacaaccaaacaagtgagggaagcactttaaacagttcaaagcatgaaagctgaatcagacacaataaagaaaacacagaatgaggtgatgctcaaaatggaaagactggataaacgatcaggaactaaagacatgagtataactccaagagacagaaaagagaatctcatctattaaagactggctagaggatatacattcatcaaccaaacaaaacctcaagtccaacaaattcctaacacaaaatatccaggaaatatgggacactgtgaaaagaccaaacctaagaataataggtatagaagaaggtgaagaaacactgctcaaaggtacagaaaacaaattcaataaaatcatagaagaaaacttccccaacctacagaaagatatgcctatgaaactacaagaagcttataggacaccatacagactggaccacaaaaagaagtccccccgacacataataatcaaaactccaaatctacagaataaagaaaaaatattcttttccaatcaaatgggctcaagaaacaagctggtgcagcaatcctgatatctaacaaattagtcttcaaactaaaatcaatcaaaagagatgaagaaggaaatttcatactcatcacaggaaagtccatcaagatggagtctcaatcctaaacatctatgccccaaatacgaaggcactcacatttgtaaaagaaacattactaaagctcaaaccacacataaaacaacacacacacttatagtaggagactttaacaccccccttatgccactatacaggaccaccagacagaaacttaacaaagaaacaaaggatctgaaagaagttataacccaagtggggttaacggatatctatagagcattccatccaaactcaaaagaatataccttcttctcagcgccacatggcacattctctaaaatagaccacatagtaggcagcaaaggaaacttccacagttacaaaagaattgaaataaccccctgtatcttatcagaccaccatcgagcttcaacagactcgagagcttcccactccaattgccctgttgggatgccacttgtagactctttctgtaacacatctctgcagcacccatcattccttgggactgatacacctgtgccaaccactaagggacaaatgcagaacatttgagtttcctacagtctggttccccactcccaagaaattcaatcaactctaatgggttaatttttaactcaattattggtattctttgtgcccctcaaaacaatgagagtaatcacattggttattctgccagcaataacttcctagccatatcaagctgaagtctaaagagtctccaaagttgacaaatcaagaatattacattacaatgcaaaaactattgaataaatgacatgaatactaataaaaagcaagtttattcagctgtagtactaaaaaaataatccaccactaccaagtaggctttatctcagggatgcaaggatggttcagcatacgaaaatccatcaatgaaatccaccatataaacaaactgaaaaagaaaaaccgcatgatcatctcactagatgctggaaaagcctttgacaaaatccaacatcccttcatgataaagatcttggagagaacaggaataacaggaacgtatctaaacatgataaacgcaatatacaccaaaccaatagccaacatcaaactaaatggagagaaactcaaagcgtttcctctaaaatcaggaacaagacaaggctgtcgactttctccatacctcttcaatattgtacttgaagttctagctagagcaataagacaagaaaaggggatcaaagggatacaaattggaaaggatgaagtaaaactttcactatttgcagacgacatgatagtctacattagtgnnnnnnnnnnnnnnnnnnnnnnnnnnnnnnnnnnnnnnnnnnnnnnnnnnnnnnnnnnnnnnnnnnnnnnnnnnnnnnnnnnnnnnnnnnnnnnnnnnnnnnnnnnnnnnnnnnnnnnnnnnnnnnnnnnnnnnnnnnnnnnnnnnnnnnnnggaaacatcacctttcacaatatccacaagcaacataaaatatctgggggtaacactaattaaaaaagtgaaagatctttacaataagaactttgaaactttaaagaaagaaattaaagaaaataccagaaaatggaaagacctcccatgctcttggataggtagaattaacatagtaaaaatggcaatcctgccaaaagcaatctacagattcaatgcaatccccatcaaaatcccaacacagtttttcacagacattgaaagaacaatactcaactttatatggaaaaataaaaagcccaggatagccaaaacaactctcaacacagtacaataaaggatcttctggtggcatcaccatccctgacttcaagctatactatagagccatagttctgcaaacagcttggtattggttcaaaaatagacagatagaagaatggaatcgaattcaagacccagatactaacccatgcacctacgaacaccttatttttgacaaaggtgctaaatctatacaatggaaaaaacatagcatcttcaacaaatggtgctggcacaattggattcggacatgcagaagactgcagatagatccttacctgtcaccatgcatgaaacttaagtacaaatagatcaaagatctctccataaatccagccacactgaatcttccagaagagaaagtgggaattacccttgaacaaattggcacaggagaccgaacatcaagccagtagcacagacactaaggtctgcatttaataaatgggacctcctgaaactgagatgcttctgcaaggcaaaggacacagtgagtaagacaaaacaaccacccacagaatgggaaaagttcttcaccgaccccacatctgatagagggctgatttccaaaatatacaaggagctcaagaagctagccaccaaaacaccaaacaacgaaattaaaaagtggggtgcagaactaaatagggaattctcaacagaggaatctgaaatggctgaaagacacttaaaaaagtgctcaaaatcattggccatcagagaaatgcaactcaaaacaactctgagataccatctcacgcctgtcagaatggctaaaataaaaaacaccaatgtcaaaagtaccaatgacaacctatgctggagaggatgtggagaagaaggaacactcctccattgctggtgggagtgcgatcttgtaagaccactctggaaatcagtatggcggttgctcagaaaaatgggaatcagtgtacctcaagatccagccattcctctcttgggtatatacccaaatagggcatgtacttacaacaaggacatatgttcaaccatgttcatagcagcattgtttgtaatagccagaacctggaaacaacctagatgcccctctattgaagaatggattgagaaaatgtggtacatttatacaatggagtactactcagcagaaaaaagcaatggaatcttgaaattcgcaggcaaatggatggaactagaggaaaccatcctgagtgaggtaacccagtcacaaaaagacaagcaaggtatgtactcactgatatatgaattttagacatagaacaaaagactaccagtatataatgctcttcaccaaagaaactaggaaacatgaaggactctaagggttaaatggtccccaggaatggaagtggcatgaactcctgagctaattgggagcatgagggtaggggagaggttgctgccacaataagagcacaagaagaggagtagaggagtggaaatagaggagcagagatattgagtagggggaagaatagaggagagagagcaggatgagaaataccatattagagggagtcactataggtctgagaagagatctggaatagcgagatctccagagacgtataaggatgacactatctgacaatccaggcaatggaggagaggataacctaaaagcccttcccctaaaatgagattgatgactactctttatgccatcctagagccctcacccagtggctgatggaaacagagacagacatccacagatatacaatgagccgaaatcgggaatttagttgaagagagggaggaatgaagaacgaaggggtctgtactaggatggagaaacccacaggaactgttggcctgaacaagggagagcacatcgaccccagatgctgtccaggaggcctgtacaagactgatccagaccccagaacatagatgtcaataaggaggcctctgcactccagggagcctctggtagtggattagtatttttccctggtgcaagaagggactttgagagcccatcccatatgaagggttacactctggccctggacacatggggaagggcccaggatcagcataggaagacttggtggactttgctgtttggggggtaggttgggggtgggggaggagaaatggggtgaggggaaggagagggagaacggacttacgtgtgaaacaagtctgttccctaacttgaattaatcaaaaaaatgaaaaaaagatgaaaagaagaaaaaaatagcacagctgctactacccagaaaccctcactgtaacaaggaactaccaatgtatagtactaatgtggatcatgtctggcgcccaagaatagtgcagctttctcttaacatctcatccttctccccaaaatcctccctagaaataaatacatatagaaatcaaagcaaggaagaagtctcatcagatagttttatttttatttatttgcatgagtatttgtgcatgcctgatgccctgaggcttgaagagggcatcagataccctggagttacagatacttgagagagggtatatgggtacttggaactgaaccaggtcccctaggaaagcagccagtgcttttaactgctgaggtacctctcctatcccagtcacaaaaccttgtactacaccattttagttccattcatttggctaattatatagcaatctcctttccctgagtctaggtgacaaccaaccaaagagagccctacagtttctgcactttgtcttgtgatgtatgcctacaccctacttactaacatttccctccccaagaatgtgggtgaagaagagaaggattatctcatagattagaactattttcttttcaaatttgggcataagatgtcccctggcaatcaattaacttctccacaatctcatccctacagaataaagaaaagagaagttgggcacataatggcaacattgcccttacactaaaacatttatttcttttattaccattatattttattcatgtgtgtctctcagtgtgaacatcatgtaagtggaggccagcataggccaaaagaggtcatcagattccttggagctggaattacaagtggttgagagcctcctggtgtggttacttagaactgaaagcaggtcctccaagagagcagccagtgctcttaaccactgagccatctctccaatatgaaagatttactaaacatgaaataagaaagacctttaacaattagcatttattgtgtctagcctttaattcattaactttttgtacaagtcagtagatatgataaattaaaattcctctgaattttgtccataatttcaaaacttaatatgtaagatgcatcattgtgtttgcttaataattattgttggcattattttattatctagttacctagtttcaaccagtttgatttgagtaaactgcggactctttgttcaaatatatatgttcatggaaaaagggacaaaaatctgtttcctgttctttcacctaaatgtgatattaaaaacagatataaatcaaggccaaagatgtatgggtagttaagagcacttgctgctctttcagaaaaccagagttctgtctccatcacccaggtcaagcagttctcagtggcctgtaactccaactccagtgaaaccaaggccctctcagtatctggagaccacacacacaaacatacatgtgtacatactggcatgggaacttgcacacatacaatgaatttaaaattaataatttgtttggttagtgcagatgtaaaccaaaggtgactatataagaaatgcaagaagcccaataattatgggagtatattcttgggaatgtacatcacacaggtgtatatgcccgtggaggcctgaagagggtgttgcatacataaaagatggagctatagggctgccagccatattctgtggatgctgggaaccaaattcaagttccctataagagaagcaagtactattaccagtgaacctccagggagttttagaatatgatttccatttttcattgttttagattcaatgtatttattcattatccatttaaattccagaacattgtgaagtttctaaataagttatcttttatgacctgtatatcatatattatatgatatataataaataaataaataaatattaacaataaatgttaatattcttcccatcttggagtagaatttgcagaagagaaagaaagcttctctcaattttcctttgctctgccaggcttgtggaaatgtttgatctcccaggggggttgcagcaagaggctcttaagggtggtttagaatccaaacagccttgaaagaagcctgaaatcttagccaggactttaagtttgaagtgataacagagaatacaaaaggttttaagtgggagggagaggtagagagcctaaggccatgagaagtatttctatatagatgaaaagggctgccttagaaataaatctaagccctcagtcataaaacaaaagcaaaaatacccaaaaggaaaaacaaaaccatgttgcctgtgcagatggaaagttccttttccagcttatagtccacactcagtagaaggtggggagacaatgtcccacaaagccagatagaaaattgggactcctcatgtaaatggctcagataacaagagataccttggagccctggagagtttagaatttcagattaaggcaccctggttctgggatgttcttatgctgccactttatggaacatctacaagcttttcatgtggttctgcttttgtatccacttcaccttccaccataaggaggcaacaactgtgctcctgtgcaggcagacaactccaggagctctattcatgtcatactggccttttttcagctgactccaaagcacacagacagcctcttttgtcactgtaatggatactaggtgccaggctcttgccagaaaaagtatgaccttgaatgtctgctatttaaccctcataaaaagtcagactgcaggcatagcatttataaatgtgatctgaaagataagtctgtctgtctgtctccctcctccctccctccttctctctctctccatcaagagtagagcctgacacttcctcctagaagtaggcagacagtgagtcagtgaccaccactctcttccaagattccagacatactcccacctgaccagaggaatgtaatattgagaatactagagtaagtaagaggagggagagtgactgaagatctgttccaaaaaacccactggttcaccaagctgggcatgaatgaaatacttgcttctgcctcttagtgtcctcctctctatctctatatctcccccaagaagtcacatagcagtgagctatttttttattagaaatataggtaggctttaatttataaagagtctaaatttcctgaatggttttaattctgtcttgcattttgtgttttaaatcttataaataagtgtacagctgtcagaagtatacatatatctctgcttattccagggttttatcttttcccacccacacatctcagtctgaccctgtacttcccaattataatgagctacaaagtacacaaagatcatcaatagtaaaattcttattagagtcattggcatgtcataaactgaatgatactctcaaaaaaaatcctttcccaaaattataccttaggttcatacggattttcaaaactacagctgataaattagccttgcacctattccaagtttgcccttcaatttgccaagcacaggttatgctaataactttagattgttttaatgtcaatgccattatgtaatttaaatttcagcttactggaaatacaagtttcttcttcagtaatgttttaaaaaaatattcttttcttagtggcataactaatgagccaccaaaaaagcatgtgtacaatgaggaaagatattaaataacaactgacagagtcaaatgaaaaattgctacattttgacatctaaaggattattttcaattatttttcttggacaattaagcatgttcaaattccataatgggctgtgtcagtcatcatcatacataaaatgcttccgtggtgtacaataagcttttctcctcatataaatatctaaggacctgtaattacacctcattaaaccttgccaccatcatttggaagtctcattcataatatttagcctaaaattgtactaaataattaaagtcaattatttccaaagtactcatgaactttttatctgggaaatatttaaatacacacatgaggtaaagcttcaaatattagtcagtggtgataaatgaaatgtcaacaatttgtttttactactgtagaaaatgtgtaccagaataattttatttttattttatttttaattacatgtagacatgtgagaagatatacttgtgtctgcagatacacacagaggacaaaagaggattcagttcccttgaattggagttacaggaagttgtaagccatctgagtgagtgctgagaacctaactggggctctctgcaaaagcagtacctgctccagcccattgatgaacttgtgatatgtttcctatgtatgcttgttctgtaaggctcatcaatgattcatcaaaataaatgaactcagtcagcattttacccaatgctaagtaggtgacagccagttaaatacacaatatcatttgtaacaaagcatatcaagatgtcactagcagcctcctcagccagggacaaaggagtctattactaatagcatgagcaagagacaaggtgtcaatactttgcaagttccgtgaatcccaagctctgagggtgacataagagagaccaatgggtttccctgaaggaaaagtcgagctcagagatcccaaatttgtttagtggtggaaagactgcttaatctttgtaacagaagaaaattgatgcaacagtctatatataaacccaccctttgattcagtggaagacacctcaactctcttcatacaacatccttgaaaacacccacatcaaggatctccagcccagtgtttctgcacttctgctccaggtaaacacatgaaaacctatagtaaattgttttacaatatacatacaacatacaagaggtcccggtagcatattgcaaatatgctcccaaataaaatcttatacacttgactaacatcccccatcaacctgcccatccctctcacatcacacccatcaaatatatacaatcagtatcaattaaagctatagtaacaactttaatagactgtcaacagcagaagtacagtggttgttagtagctaagtggctgctccacgaatttgcatttctctgcaataagtaaagaacaagataggaagaagagagaaggaagggtagagggaaagaaatggggagaaaatgggtagggatggaagaagaaaataataaaatgggaggaagggaagaagaggaaagtagtagggtggagaaaagagaaagcaagaagaggaaagggaaggaaagcaggtaagagaaaaaggaggaggggagagagggagatcttgccatttctcttatctaattgggaataacaggtgttttgttgcttttttttttagctactgtagttgtctactcagctattctaaatttatgttcagtaactgacagactatttaaagatacaaatccataagcattctgacttagcaagtatggaatgggctaaaaaaaaaaaaaaaaaaaaaaaaaaaaaaaaaaaaaaaattttcaaaaaaactattctcagcagtgttcaagattcttaaacacatggtaagtttttcagtttcataaattcctaagtgaactccaaagatagttactatatgccaatcagattgtacttcccccaaaagggaaaaaaaaaagctgcaagacaataagaaccatacatagtagagacaacagcaaactggtataaccagttcctcatttctattgctctccttgggtgaaaatttttatgaggtagcagtgtgacttccaggttgtgaccacaaaaatgtaaactagaaaactcaacagacaactcagccaggaaaggacttgctttgcaagcacaagcacctgagtttgaacccaggacacaactaaaagttggaggcgtgatggttggcactaacagtcctgaggcttgaaagacagagacaagcagtcctgaggctttgtggaaagacattctgtctcgtttgggggagaggaaaatgtagctcttgaatagactgcccaaatccatcagaagaccttccaaatagtgcttttcagacacagaaatggatgtttgtaaaataggcggacttattgtacacatagaaggtatgtagcatctcatcaatgagtaacccaaacaaataccaggtgtttgatatgttctggaccttgcagaggcaacatactatgaaggacaaagaaaaatacatataccattttttttgttcttaaatgtcttcagctaaatgagagaagaaaacccttatacaaaaaaaatttccagataacagaaaacccacacaataataacagcaacaaattggtacagccattataatcagatagtaaactaaatatggaggaggacacagaggatgagaaacatggaggaaggaagggagagcagtaactggattagtttccaggcttactgatgcaaatgcaaaaataaaaagatgtgaaaaaagactagcactagcaagtcaatcctgaataaagctctaaggactgttcactaaatgaaatccaagggcaacagaatcatcaccccatattccccgtgttaatatccacttcctataacccatgtgttatttttagtcattgcaaagttctacttcacttttaaggtgctaactttaaggatggttcctcctttaatttttgatatctcaaacacaaaattcatgtgagtgtcatcaagtctacctccaagtatctacttaactcctctcagctcgaactgtgaagtatggctgattgtgaggctatgtgtcaataataattactgtttaatttaaatctaaaataagtaagttcttcatgcataatattttgaactgttcatatgattacactgtttgcttgattgtcccctcatatagccttctctatttgagtactacagatatgcaatgacaagcagaagaaacccagcatattaaacaaattcagatgaacttctaccattctaggtggatgagaagggcgattctaaaggaaacaaaggtttggggtcttattccttaaattgccattggtcatacttctttctgtttaatgttttccatcccacaacataattcctctgtgttgactgacaataatactccaaagacaatactcaatttctgagttgcacagcttttaacatcagatattagctatttccaatgtaaaggagtcttgagactgataaagaaaatccttctgtagtggcttgcatgaaatgtgtcattctcaagtctttcacatttgaatacttagttccccattagtagaacaatttagaaaagcttaagaggtatgatctgtggaaaaagtgtgtcactagggacagactttgacacttcagaagatcattcccagtgtgccctcatcctcctacttgcagatcaagatgtgagctctcactgtttctgccaccatgtttttgccctgccctcatggacttaaaccataagtctaaatggttttattttataagttgcctcagtcactgtatttataacaaaaatagaagcctaactaaggcatcacctaacaatgacttcaatgatagtcaactgtattgtatattctcttcagtgatataattcatttagagatcactgaggacaaaaagataagtgttgcaatggcatatcccttaagaagacaaaatgttcaagaggatgaagaaaatactctaaatcatattggcataaaggtctcatagaagagctgtcaacacaggttccagtagaagcaaaaaggttgggtactcaatagaaaccacagggaccatggaacagcacatgccagtaggttggccaacaaagggttactacacatagggcataaagagacaaaggtctgggaagcatagtgactgtactgattatttgccaattgtgtttcagttccatttctataatctgaagaaggaagaaaaatgtaggtgttacatgtggcattttgcagacaagttttctagttggctccatttctgccaagcataaacatggggagaagactggacacaagtaaaaggaatcactttcagtcccaacttgtcctaatggtgatagccactttcagagaccctgtgtccatgactctgatctcagcaacactgtctggttgccccaccctgcattgtagtgaggcaaggttttgcttctgttaaccaaaaataggagttgcttctaagtgtaactatattaatcctcacccttccctccttccagtcttctgatgcctgtcagctaaatcccctctgtaaagtctcttctgtctgaaacacagtgcagcatctctttgcctctcttgtatgtggctgataagggtatgatcatttgctggatttctccaattaggtacctcattttcttgaggtttaatttagtgaagaccccatctttagtgtaattaaagacataaggaaaatgtgtttttgtaatgatgcaatgattatttaaattatggcgtgtttgccttgtgaagtatctacagaaagcaagactaagaatccagagggaggctacacttgactgctacaatgagaatgaagtctcctgggatagtaaatttgtgacttagctatgtgtgctaactgatgtgtatcagagttgggctcctaccctcctgcagagaaagaaattctctttcttgattgcattaagggttaaggggggttcctcaatgaggatattcttgagaaacctcagacttacacccaaaggaagagaaaaagaatttaaattccagtgtctaaagcaaatgttctccatgggaagttagggatctgcagtcaccaataaactaaacttcttgagcagaaggggccttagactgccttggtcttctcagagctacatttcactttgcttcagtgtaatccagagaataatctatgcaatctataagggattttaagacctggacacctcacagatcattatgacagtcgactgcattacagcaatgctggttggacagagcaagtgggaagaagtgaacacaaaatgtctaatagtaaaatacaggtttttcaaagtttcaactcgagaaaaattcagtctctgactctcagaatacagtcatctggagtacgccatgatgatttcctcatagaacaaaagtaagaaaaatactgattataatgaagatgattactatagatgtctgaggacacaaaatcaaaagggaatgtcagtgcaggactgggtcatcctcttggagggaaggctgtggactcaggactttagcaagaaagtttcacatcacacagtcagtgaaagaactctgagctcagtttcctttgacatgagagctgaaggcagagggagaaatgcagtggccaagagaattgtgcccagttacacaacagcataggagtgtgttcttccttgtttggtgtgtacttgttagactcactgctttcctttcttcttttcacccttataatgcaatttaaaaattattgagaccaattgacttaacaaggtggcctttagttgactccagaatgtttcatgagaacttgactgtatgagaagaaaaaattatactactcaaatattgatggtgactgctggagcttctaccattggcaaaatgctgacaatgtacttgtttttaccttttatcatattttggagtgtggggggcatgtgtggggggaagggggtagtgttcaagcacctgccgtggtatggctgtagggagaaaggtatgtccttccactgcatgggtcctgggcactcagctctgagttcaagtcaggttctgtgcaagtaccacacatctgaggttgtaattatttgttttatgcacattgactcatcagtggaatctctgagctggcattgtcccctgaagtgtgaacattgcctgtcaagtgtgaaccattcccatgttgcacgctttaacctgttctactgttctgaggccagaggtaccagataccctcacagaagcttcacatcaggtcctgcctagagggtcaggaaggttttagaaagaaagaggagaaaagaaagtcactccacactgtatttttctctcacatcttcagaagggtttggtcactaaagcagctacatctttcagcatccaggacaggaacatcctctccagtacctgtaaagagtcactgaaatgtcagtaccagccaggtaccctctcacacatcagcatctgtcccttccatgggcccaatctctgaagctctgtccctgattgactgtcttagagccttagaaggtaacagcttttaggagtgggagcctctctgacacctgctcctgtagaggaggcagcctctgacccctaaattgtgagatttcctccttctttcttccacttacattcaaaaccatcttcccgcagctaaaaacctcttactcaatttttttctagttttcaacacccacagagttctttcctacattgttttcccagttcttcaaacattgtgcattgaaattaaaaataaaaatatcagaggctaatttttcactgggcagccaggtgctggcttcagggctccccagggatagattcaaaccctgagcaccagcaccctgttccctgagtgaagcacagtcctgggggaacagcatagaagaaggatacaagcaaacagcttaaaaatatttgaaggaaatacagccagccttacagtactcttctcagagccccctgaggcctgggaactgtgcactttggagcccatcccagtgatccagcccacccagagactgtcaaggccccagtactagtcctgcctccacccaagggaagagaagaaccatcagagtattggacctgcttgcacccaccagaagggaaccttggacccatatccaccaagagaggaagacactacccctgccctcactggaagaaggaatgggaagaagacaatataaaaacacatttaacaatttaaaaaaccaatatggcatcaccagagtgtaaggaatctacaccagcaagacctgaacatctcaatgcagatgaagcagaagagaatgactttaaaaacaacttcatgaaaatgatagagtccctcaaagaggatataagaaaatcttttaaagaaacagaagaaaaaatacaagaaatcaacaaatctcttaaagaaagccaggacagcaaagaaacaatcaaacagatgaaggaaacacttcacacagttcaagacatgaaaactgaattagagacccccaaaactgaagaatggatagagaaaatgtggtacatttaaacaatggagtactactcagtgggagaaaaaaacaatggaaccttgaaattcacaggcaaatggatggaactagaagaaaccatactgagctaggtaaccaagtcacaaaaagaaaagcatggtatgtactcactcatatatggattttagacatatagcaaaggattaccagctcacaatccacactgccatagaagctaggaaaagaggaggaccataagagagacatacatggtcccctagagaaggagaaagggacaagatctcaacaaattgggagcatgaggagagagggagctaggagatgggaaggggagaagaggggggagaggaggacatgagggaacaggaagacctagttgggggagaagaataaaggagagcaatgtaagagatatcataatacagggagcctttataagtttaaagagaaatcagatactagagaaatgtccaggaatctacagggatgacaccaactaacaatctaagcaacaaaagagagactaccttaaatgccctcccctgagaatgaaattgatgactaacttatatgccatcctagagccttcatccagcagctgatggaagtagaagcagacacccacagctaaacactgactgaactggaatccagttgcacagagagaggagtgatgagcaaaggggacaagaccaggctggtgaaacccacagaaacagctgacctgaacaagtgggagatcatggtccccatactggtagctgggaaagtagcataggactgatccagaccccaggaacatgggtgtcattgaggaggcctcagaaatgtatggagtctctggtagtagatcagtacttatccctagcataggaatggactttgggaacccattccatatagagggatactctctcagcctagacacatgggtgagggcatatggcctatcccaaaggatatgacagactctgaagatcccccatggaaggtctcaccctccctggggagtagaagggtatgggataggtagggtgttagtggaggcaggggaggaggggagggagagggaactgggattgacatataaaacaatcttgtttctaattaaattaaaaagtggagaaaaatatatatggaataatgactaacttatagaggttcctgaagaagaaagaataaaaagaacagcagaaataactgaatattaaatgctaacatcaattaaagaagcaaaaaccaaataataaaaatgaaacttggctaatctaaaataaattctttgggcccagcatgttagtgcatccttataatctaggcattagaaaggatcatgaatttgaggctagcctgagctatgcagtagattctgtctcataataaagtattgacagaagcaggggaaaaaagaaaacataaactgagggaatgctggaaaggaaaagctgggtaaatgatcaggaactacagatgcaagcataaccaacagaatacaagagatcaaaaagagaatctcaggcattgaagatacactaggagaaaagattgattgaccaaagaaaatacaactaatcactaacacagaatatccaggaaatacggggtaccgtgaaaagaccaaacctaagaataatgggcacagaagaaggtgaagaaatccacctcaaaggttcagaaaacattaaacaaaatcatagaagaaaactttcccaacctaaagaaaaacatgccaatgaaagtacaagaaacctaaggaacacttaatagagtggactacaaaaaagtccccttgccacataataataaaaaccccaaacatacaaaatagagagaaatattaagagcaactaagaaaaaaggccaagtaacatataaatgcaaacctatcaaaaatacacttaacttctccatagaaactctgaaagccacaaggtcctggatagatattctaccaactctaagagatcacagatgccatcccagactactacaccacacaaagctttcaatcactactgatgaagaaaacaagatattccatgacaaaaccagacttaaacaatacatatctactaattcagccttacagaaagttcttgaagaaaaattccaatgcaagaaagttaactacaaccagaaaagcataggcaatagataatcctactttaacaacagctaaaagaaagaaggggtggaaattcacacacaattccaccaacaacaacaaatctaaaacaaacaagaatgaacaatcattaccattaatatctctcattattaatggacttaactcacctataaaaagatgcaggctaacagaatggatatgaagacagaatctatccttctgctgcatacaaaaaacacacctcaaattcaaacacagagagtacctcagagttaagggttgggaaaagattttacaatcaaatggacccaataaacaagctggtgtagtgatcctaatgtctaacaaatagactttaaactaaatcaatcaaaagagatgaaggacatttcatattcatcacaggagaaatccatcaagatgaagtctcaattctgaacatctatgctccatatatgaagtcatccacattccaaaaagaaacattactaaaagtgaatccatacataaaacctcacacacttaagtgggagaattcaacactccactttcatcactagacaggatcaccaggcagaaactaaacaaagaaacaaaggaactaacagaagttatgacctaattgggattaacagacatctatctatagaacattccatccaaagacaaaagaatataccttcttttgatcaccacaaagaaccttttcgaaaatcaaccacatacttggcaacatagcaaacctcaacaggtacaaaaacgtagaatagccccctgtagcttatcagaccaccaagcttaaagttagaattcaacaacaaacacaaattgcagacatcctacagactcatggaaattgaacaatgcacaattacaccattcctgaaccaaggaagaaataaagaaaaaagttaaagacttcctggaattcaatgagaatgaagacacaacaacccaaacttatgggacactttgaaagcagtggtaagaggaaagttcatagcactgaatgcccacatgaagaaactgaagaatagtcacactggagaattaacaacacaactggaaactctagaaaaaagaagcaaactctctgcagaggagcagatgctgggaaataataatttgagagctgaaatccaaaaagtagaaactatgaaaaaatgcaaagaagcaatataacaaaaagttggttctttgagaaaatcaacaaaattggcaaacctttatccaaacttaccaaacagcagagagtgaacatgcaaattaataaaattagaaatgaaaagggggacatatcaatggacactgaggaaatccagagaatcatcaggtcatacttggaaaaaatgtattcctcaaaatttgaaaatctaaagaaaatggacaattttctgggtatatataccttacaaaaattgaatcaagaagagataaacaatttaaatagacctttaaaccctaatgaaatagaagcagtcatcaaatgtctcccaaacaaaaaaaagcccaggagcagatggcttcagtgcagaattctaccagaaattcaaacaagacctaataccagtgctcctcaaattgttccacacaatacaagcagaagggtcattaccaaactctttttacaaggcttcaacaaccttggtacccaagccacacaaagacacaactaagaaagagaactatagaccaatatccctcatgaacattgatgcaaaaatactcaataaaatattggcaaatcaaatccaagaacacatcagaaaaatcatccaccatgatcaagtaggattcatcccagggaaacaaggatggttcaacatatgaaaatccatcaatgtaaaccacaatatcaacaaactgagaaacgaaaatcacatgaacatctagctagatgctgaaaaagcctttgacaaaatacaaaggtcttggagagatcagaataacaggaacatacctaaacataataaaagcaatataaagcaaaccaacagtcaacatcaaaataaatggagagaaacacaacatgattcctctaaaatcaggaacaagacaaggctgtctactctctcaatacctcttcaatattgtccttgaagttctagctagagcaataagacaacaaaagcagatcaaggggatacaagttggaaaggaagatctcaaactttcactatttgcagatgatatgatagtttacataagttacccgaaaaactctaccacagaactcctacagctggtaaatcttcagcaaagtggcaggatacaagattaactcaaaaaatcagtaggcctactatatacagacaataaatgggctgataaagaagtcagagaaacatcaccatttacaattgcctcaaacaacataaaattccttgggataatgctaatcaaacaagtgaaagacctataaagcaagaacattgggtctttaaagaaagaaattaaagaagataccacaaaatggaaagatctcccatgctactggataggtagaatcaacatagtaaaaatggcaatcttgccaaaaggaaactacagattcaatgcaatccccatcaaaatcccaacacaattcttcacacaccttgaaagaacagttctcaactttatatggaaaaacaaaagacccaggatagtcaaaatgacccagtgcaataaaggaacttctgggggcattaccatcctgacttcaagctctattatagaggtatggtcctgaaaacagcttggtattagcacaaaaatagatagacaaatggaacctaattgaaaacctagatatggacccacacacctatgaacaccttatttttgacaaagaagctaaaattatacaatggaaaaaaggaagcatcttcaacaaatggtgctggcataactggatgctggcatgaagaagactgcagacagatagacagatacacatctatccctatgcacaaaacttaagtccaaatggatcaaagacctcaacataaatccagccacactgaacctcttagaagagaaagtaggtggtgttctcaaaagaaatgatacaggagactacttcctaaacataacaccagtagcatagacactgagattcataatgggacatcctgaaactgagaagctcctgaaaggcaaaggacacagtcaacaagacaaaacagaagcccacagaatggggaaagttattcaccaaccccacattgacagaggcctgattttcaaaatatacaaagaactcaagaagtagtcacaaaaacaccaaataatcgaattcaaaagtggggtatagaactaaatagagaattatcaatagaggaatctaaaatagctgaaagacacataagaaagggttcaacatccttagccattagagaaatgcaaatcaaaacaaccatcttgctcctgtcagaatggctaaaatcaaaaacaccaatgatagtttattctggagaggatgtggagaaaggggaacactcctttactgctggtggactgccaacttgcacagccactttggaaatcagcatggcagtttctcaggagaatggaaatcattctacctcaagatccagcaattctactcttaggcatatactcaaaggatgtacatatatacatcaaggacatctgttcaactatattcatagtagcactatttgtaatagccaggacctggaagcatcctagatgcccctcaactgaagaatgaataaagaaagtgtggtacatttacacaatggagtactactcagtgaaaaaaaagaaaaacaatggaatcttgaaagtcgtagacaaatggatggaactagaagaaaccatcctgagtgaggtaacccaatcacaaaaggacaagcatggtatgtactcacttatatatggattttagacatagagcaaaggattaccagcctataatccacattgccaaagaagctaggaaacaaggaggaccctaagagagatacacatgctccccgaaagaaggggaaagggacaagatctcttgagctaattgggatcatgggggaggggagagggagttaggataaaagagaaagggagaaaatgaggggaaaggagggaggagaatgagggagcaggaagattgagttaggggaagaatagaggagagcaagagaagagatatcataatagagggagccatataggtttaaagagaaatcctgcactagggaaatgtctagcgatctacaagtttcacccagctaacaatctaaacaataattgagaggctaccttaaatgcccttctctgataatgagattgattactaccttatatgccatcctagagctttcatccagtagctgatggaagcagaagcagatacacagctaaacagtgaactgaactcctggaatccagtttcagagagagaggaatgatgagcaaattggtcaagaccaggctggagaaacccacagaaacagctgacctgaacaaaggggagctcatagaccccagactaatatctgggaaaccagcatagaagtgttccagacccgctgaatgtggatgtcagtttggagctctgggaaatgtatgagggttctggtagtgatcagtttttattcctagtgcacaaatggactttagtcgcccattccacatagagggatactctcccagcctagacacatggggaatgggcttagtctttgctccaaatgatatgacagactttgaagatcccctaaggaaggcctcaccctccttgggagcagaaagttaatagaataggggtgagttgtggggggagaggggagagggaaagggaaaaaatattccatactacaattctttgctcaaaagacactcagattttgaaaagactgcccaaactgaacaaaggtggaagcagtaggggtggccctccccagggaagaacacaccagttcgttgtccattgccaaacggtcagccctgaaaacacacatataggtagcataaacaggttgtgtgtgtgtgtgtgtgtgtgtgtgtgtgtgtgtgtgtgtgtgtgtgtgtgtgtgtgtgtaagtcaggcaatggtggcacacacctttaatcctagtacttgggaggtggccagcctggtctacagagcaagctccagaacagccagtggatacacacagagaaaccctatcttaaataaaccaaaacaaaaaaacagaaggaaggaggaaagaaagagagagaaagaagaaaagagagagagagaaagaagatctatgtatacacaaatacatatataaatatgtaacaattagtgacaaaaaagaggccatggatttgaaggagagctgtgggggatatattggagggtacggaggggagaaagggaagtgatgaatgttataactaaataaaaataaagaaaagaccatcaataaaaaggaaaagaaaaaacaattgaaacagtgcccatggctacagagtgactacacaggtgatcatcagtggcacatgggttcatggcttcttgtgtttcactatctgcttgtgagctttcaagactgtgctgatgccattagaggcaacagttaaaacattatttccatgaaacaaaactaaaagagaagctatagggcaacagcagctgcattccctaccctgatcaacatgagaaaataaagaatataagtgttccttgaagctaaaatagcctagattctaggccctagaggcgatacctgaacatacaaaacaaaatgagaacactgaggagttatggaagcttaaaaaccccaaacaaaataatgatgaaatttgataataattccattaaaatgcacaaagacaaagcccatgtgtccagaatgttcccctctgcattatgtaactctagcattccacatttcctatgtggattcttggtctctattttaatataaggttaaatgtagtcaaagctaggattattcctgagtttgttgtcctagtatccactagatgggaatctatagatgtagacattaaaaacaaaccatgactggagagatgactcacagttaggaggactagctctccttccaaaggacctgagtgagattcccaacaaccatactgggtggctcacaatcacatgtaacttcaacaccctcttctgaacttcaagagtatgaccctcaggcagcacatcaccacacagatagaaagacatgtgcataaattaaaacataaaaatctttttaattaaaacataaaaacctttttaaacacacatacattactttgccatcttaaacattactggcctctggttggagctcaaatacttgaaatattaactactatttactcagctctttgggtcagtttatgaacatagagatggaggcagtgaattctactttattttaatatataagaagatgggtttgtcaagtaacccacctgagccaagattaaaattcaatcatttcaaactaaaagcacatgtatagtaggttttaccaacggattaaattagtattctaaatactctaacaattgccttccttccacaacatccacagagagattattggcaaaaagttctattcaggggcactcacttcacacttagatattatcacagctgtgttgggctagtcatggttttctataaccatgcctttcactttgaattttgctgttacttctgtttcatttagttttagagagagaaaacaaggccagcagcctgagaccaagccactcagtttcagagacaactgtgaacttataaatgggtggttctactaactatgcaactggttatcaaactcaaggaaataataaaaagggaaggaagagtgtgaccatagcatccatatacaatacatgcaaatggaagtttgaactgtctaagacccatcatgagttaaaagcaatgactttgctattgagaatgagtgtacattaattatcttatacttttcacaatctggtggtgtgttaccagaggttggtggtctttacagacatcaccctggttgattaagcctttttctttttccctcttaagggatgacctttacatgtgtgtataactctctgcctatactatagggtaagcactcaataagcaatcattaagagggtctgctatgttctgaagttggtgtgggtacatcagacttaattgtacatatcatattcagtggcagaaaactgatccctaagctaaaggccacagtccagactactgtgtctcatataacacaggataacatctcagagaggtagaataaattagcatacgtatatttgatcatttttaaagtatcaagtgaaagcattaataagtaaaaatttcaagaaatgttctctttaattcatgaatcatattaactattaatatcaggaggatggagggagagtacatacttcaaataaaaggcatcttctgtagaattcaaggaagggtaggtttctcctgcagcctacccctgtgaagaaacttcctgatcctgcacaccaaatagcccctctttatcctctctctctctctctctctctctctctctctctctctctctctttctctttctcacacacacacacacacacacacacacacagacagacacacacacacacaaacacacctagtcacctgcttgtgaaagaaagaaaacagacttccactgacctggcagggctagtccctcccgcctccttggcagtagtaagtaaccaaaacaaaataaacaagattgaatgtgcagccaaagtctggaaattcagccttaggaggaggacagggtccctgctggacagaggggaaaaggctttttggttttttgagacagggtttctctgtgtagctttggagcctatccttgcacttgctctggagtccaggctggcctcgaactcacagagatccgcctgtctctgcctcacaagtgctgggattaaaggcatgagccaccaatgcccggctggggaaaagggtttttaaagaaaagaatgtctaataaattggagaggatggtgactgtttccctggaactacaaaggaaaagatttctgcacagacctggtagataagtcctgcactcagctggtttgcttaattataggaaatctaaggtgtcccattagttcaggctctactgtattaagcgacagttttcagagatcgaaatgagtctgaaatcagagaaagatgccttgactctgtggggtaagcttatctcccagccgttttcctagctcagctctagtgtctggagtgatgttaccccagacacaacagttatttaatctcacttcgtttttcaatgtcaaggcacattcatattttattagtagaaacaaagtccattagcaaatttttcacatgaatgaatgtgcagatgcctttaaagtggcatgattcctttgattgttataacttcatgttaatgttagatacctaagtgtagagatctgtgttcttctccccctctgcttatcactgtccagtaacactgagtaaccagtgtcttcccaactcattaaccaggaaaacaggcacatgcagtattgaaatgatagctaattaaaacaaacagctttttaccaaggaaatattaaaaagctataacttaaactcttatgtgtaaatgcatcctgttacaaggctttagttgtgatttcactaaaatgctggtattaaaatggatattttgttgacaaacatttataattttaaatgaccctcaagtagtaaatataaataatttaattcccaggacacagttctgaatttcttaacagtatttgtggtggacaacagaatatgtggaagaaatatcccagctgaagcaacgattcagcagttaagagcatttgctacccttgcagaggacctgagttcagttcccagcatccacatgggaggtaggggctcacaactgcctgtaactatagctacaaggattctaatgtctctaaaccatgggaaccgcgcgcgcgcgcacacacacacacacacacacacacacacacacacacacacacacacacacacacactttggaaacaatattttggaaaacataatatctcattaggacaaatccatccctcatatttgaaaggaccaagcaggtgccataaacaggctgcccagtcttctctcagagatcaggcctctatttcagtttcctgaaactgaactagtagtttctaaggaagagccacaaataaagggcaatcaatccccaacacccccaacagcaaggaagaggcctggaacgtgcaatacctggccagggcagacctcagccagcctctacagcagctcaaggacaggacctgggacttatccaggcctgcccaaaatggaaaactgtaaccctgaccagcccctgactggctccatcgaactagaacatactaatatgattgtcacttgcttaagccaatcatatctaaaatgacgtgacttccttagacactctcctcagcaaggcttaaaagaagcacccacctcctttatggggttgtggccatcttgcctttgtgtagagtggtcggcccagcatgctgctataataataatttttttaaaaaaagactctgcttctacattgggtctggtctcttggtagtcttttgggggtctggactcagggcacaacaatattcttagttctaagccccattttctgcaggttttttagtaacacatcccccagattacacagcacatttggtttcactggacactcaaaagtcagtagtttttccttgtatcgaaattcaaaaatctacgatgtcatcttgggcaaagaagagaacaaagacagatgagaatgaggcagtcattactgactgaccatatgatggtctttccccagatgcaatgaaactttttagaggcccagaagtttacctatcctgttattctttagaaacaaacctgggaaatggacactaaaaattaattagctgtccccccctctatccttaattttgaaatcctcttaaattcaagagtgatgtttatttgggacgtgagtgcttgacccgggatactgagtgctatctattaaaccggcaattcgaaacattatcagcagggttgtgcaactggaccgttttatacacagtgagtgaaaatcaatggtctgtctatgcctatcacagcatgtcacatctctgattgaatcttttgagctagcttatcagacatgcagcacagggataaatttatctttacaccctctatatgtgtcaccaaaaatagcccgaggatcagtataacctaatgaactaagaatgtctgataaatgattacaatgtcctccgaagtgaaagcagcagcctatcctttggaggtagagtgtgttaccaaggagaatctaggtccctagaatttgcttcctaaaaaatttcatacctgtcagttgcactgtcttaagattttgctcccagttttatgtggatgttttgtggaaacatacacagaacttatttgaatcatcattatcatgtgggcttttgtaaattttgtttttataccaaactaaaaaggaatctacattttttgctttttaaagtgctatacattataaacgtatatatctaaatattttcaaattaaagcacatgtcttaaaatcctgaggactagagtttggatcccagagccaatataaatacaaggtgagcacggtagctcaccagcatttccaatgctcagagggtagagacaagggattccctaagcaagcttgctagagagactagccaaatacgggagttctggattcaccaggatgagtcaagttgacagtgataaaagaagtgtgtcaactgtcagcttttggcctggacctttaagctcacacaaatgcatgcataacctcacacttctataccctcactaataaacccacacaacaataagaagaaaaaaataaaacttcagtaaacggttttgttaaaaaaggaaaaagaaaagaaaagagaagaaaagaaaaaggtttaaggagatgactcagctggtaaaggcacttgctgccaaagttgatgacctgggtttgatcagagggacctacatggtggaagcagagttttgactcccagaagctcctctcacttccatatgcacatacacaaactaaaaataaacaaaatgtaacaaaaatagtatagaaaaattatgtgtctttatagaatactgcctgcacaagcaaagagaaagctattagcaaaccattgccagtgggcaggagagtgattgctccatggatggaaacagacttgaaatcatgcatgaaaatgcatatggcagctttggcttagaagcatacagacatgaatggagcaaatgggtccacacaaaaatgaaacttaccattttagcttcatcacaaacccacactccatgtcaaagacacaacattagctttccattgcaaagacacaagtctctctagaaaaagcaagtgatgttagaagatccactctgaatgtacttctcactccaaccacaattgtatcctcatccatttcactatctgtggacactgtgctgagccatcatcataagcatagtgggctcaaaatgggcaaataatgacatcctccctcaaggagttttcaggtcaagtaggagacaagacaggaaatagtgtaagcagccaacataacaaaatgtgctatgtataaattgttaaagggacaataaaagattgagttcccaaaatagaagtaaagctttgttagaagcctagaagctatcaacgtgagcaaaggactgaaatttccaagaacttggggaagtctgtctatatctttagggtgtcttccttccagttcgtgccctgtctgttcctgcatgatgctttccaatgctcacatctacactacagctgttatttcctcttgattggcttccacccatccttccatgttgtaatttcttgatgttttctttcaaatctcagtagtctatagtctacgtcaaaagaagggctggacttgtcactttagtagtctaatattgtccaggagcaagacactgaacaagagctatgtcaatcattgacaaattaaaaatgggaaaaggaatagtttgtggaaaaacaggattgtggaacagctagctaggattatggaatgacacacaaaattgagacagctctaatcactgtaatgtgtaagaacaacaatgtttttgtagtaccaagtaatggtgattaagtcctagaaactaaattctgtagaccgtattctgctgccatttgccagacactatggcaatggaacagcagttgcctgtgtacatatttcagtgtgtgtgtgtgtgtgtgtgtgtgtgtgtgtgtgtgtgtgtgtgtgtgtgtgaaattctcaaaagtaatgtaaaatgtttaaaacatgctattttactgtaataatttgaaattttctaaggcttactctatgtatctgtgccttaccaatcctacatccagattttgttgtgttaacattaatctctggtatctttatgtgataaacactcagtgtgtgataaattatattgctagacaaaatttttctgttttcctgaaaactataaaaataggaaacttttaaatgtgctgtgatttgatcttttggactctgtatgaatcagcatccatcctctgagttaggagttaccagttgctaacctaggtgacagctggctgtttgaataattgtacttgaaatatggagacatgtttttttcctctctgaatctgagtcctccaatctttcacaaaataactggagctaatgaattgagtcttgcaatagaaagctcctttatccaaaactttggtactaccagtctttctcaatcctgtcctctgggatcacacacacacacacacacacacacacacacacacacacacacacacacacacatcctaactatgaggaaatgtatttcagatacaaatccatgcaaagctggaggaaactggcagggtgacttagagaaggacagggtctgatagccacactcctctcaccagtgacatcagagtgatccaaaagcactcttgtgatcagcctacaccctagcaggtctccctccacactgccactctctgggtccaggtgtgtaatctccagcctctttatttattcaggatacacacctgccacatcaactgagatagtttctctcagctagtctggcatccccaaatcaatgatatattgctatttgtgctaagtcctccaggacagcaacaactaaaaaggtagaggcagccagcaacacttatatcatacttaaccaagcatagagttccaaaaacaagtctgaatctccacaggtggtcacttcttgacagctatccatggctttagagatttttgctgtatatatagtcttacaagatgaacatttcagaatgagagtgcctcagtccttccactattggaccttaatctacatatgctacagaaagaccctaattcaactttggaaaaacattatgttaaagatttttttgtcgatatgaaaatctgcatctcaaatctgcctctaaaccagatgtggttgtgggcaccagtaatctctactcttggaagcctggagaaggaatgtattttctagctcattttgtaccatgtaatgagaccttacctccctccttccctgcctcactccctcccttcctctctctctttctctcttcatctctctctaaaacacacatactcacaaatgaatgtctctagtatcacacacacacatacgcgcacacacacacacacacacacacacacacacacacacacacacacacacacacacacacacacacccctgtcctgcttcctgcactgtttgacattgatttcaaagatagaaggagaaaatccagagttggaggcaggtagaagattaggcttgatgaagaaaggatttgaaccaatcatgatagatcaacactctccagttccctatggggcaaaatatatttcatagtgcagagtagagaaactttatgttgagccaaatggcaagtgcctatgtcttccacaatggtgacttgtttaattatccctaagagtctgctatgaggatcctagttgactgacaggctccagcccagccactgggactttaacccacagccacagttcttctggaagctgaccaccagtatttgtgcacagcagaaaccagagcagtaattaagttgcttctcagtgcaggatgaaatctggctttgagggttcttgtgaagctatgtgagattcggagctgaacttccatctgtggccatgcatcagccacccttctatcctgtttagctcccatatccgtattgcagtctagagcctgctcctgctacctcctgtctcatcttacacaggcatgtacatccacaatgcatcccctggatgtctaatctcattttgagcatctttcctttagaaggtttgagttgttggtatgtaaggatacaaaaagcatgaagttatgcccaatttctactcacacgggtggtggtttagtaccttcattaacctgtctgtgttttaacattaatagcaagactggatttcttctactatatgttttgagaactctaacaattcaagaaatcagcataagagaaactcaaccctccattcatgcttcacaggaaatgtatgttaagtagttttcaagctgcttcatcacatggttttcaatactaccaagagatttaatgactataatacgtgaactgtttcatgaccctctatgcacattcaaccatatcaaatatataaagtaatcagggtatcccagcactatgagaaccacactgtaggtaacagtcaaatcacatccctgcaagctcttattaataacagaatcactggtaaacagaactggttaaagatacagtatggattttgagtgttgttgctcctgggattacaaaacaaaataacaaaagccattttctcagtgtatgacattgttttcttagtgtgaacattgaggatattaatttgtagctattaacttacaataaggatgcacttggggtttttttggtattttcgttttttttttacttttgttgctgtagtcattaccacttttccctcctgatatattcatcccttttcttgttatgcccagacatcagcaatgtctctcaaccacctgaaagcattttatgattcatccatctgctgaactgtctgtttctattttatcttcacagtgcgtgatgattcacataagtcttttccttcttagattccaatggcgctgaattctaatccttcatgtcttatcactgtttacaagttcttcacagatgactcctttctcatggcagctacttcataaacaatttttaaaagcatcagctttgatctatatggttgagtgctatgtaagacaagtctcccagtggatgagacgtgagtacaggaagcttatctgacatgcccagactcctaaacatacccctcttctgaactctagagtcatgatttcacacagttggatcaatgtgcacaatctcttgaatgtttaagtaaaaaagattgttactagatttttttccaggaatatcatttgtacactactatgtgtgcatcataatatctcatacacaatagacatttagaaatgtactgtgcagtgatttcttacctatagtagacctaggcaggcacaagcatcattagttctccctttaaatccccactttttctctaaatagatggactttggtagcctggctgggtaactagtcatagactttctgtcaagggctggacttcatatggaaaacctgaaaggcagcaaagagggagtgattcacaaaggtgctttcagaggctagggaaatgactgacagtaaaatgtttgtcatgtgagcattaagacttaggttcaattccccaaaacctatgtaaaaaaaaatctagtggtatgcccgtaatttcaagatggtaaagaaaagacatccgacagagggctgatctccaaaatttacaaagaacccaagaagctagcctccaaaacaccaaataatccaattaaaaagtgggatacagaactaaataaacagttctcaatagaggaatctaaaatggctgaaagacacataagaaagggttcaacatccttagccatcagggaaatgcaaatcaaaacaactctgagattaccatcttactcctgtcacaatggctaaaaatcaaaaacaacaatgacagtttacgctggagaggatgtggagaaaggtgaacactcctccactgctggtgggagtgccaactcatacagccactttggaaatcagtatggcgattcctcgggaaaatgggaatcagtctaccacaagatccagcaattccactcttaggcatatcctcaaaagaagcacattcatacaacaaggatatctgtctaactgtgttcatagcagcactatttgtaatagccagaaactggaagcaacctagatgcccctcaactgaagaatggatagagaaaatgtggtgcagttacataatggagtactctcggcagaaaaaaaaaatagaatcttgaaatttgcaggaaaatggatggaactagaagaaaacatcctgagtgaagtaacccaatcacaaaaagacaaacatggtatgtactcactcatatgtgtattttagacatagagtaaaggattgcctacaatccacactgccagataagctagtaaacaaggaggaccctaagagagatttacatggtcccctggagaaggggaaagggacaagatcccctgagcaaattgagagcatgtcgggaggggagagagatctaggagaatgagagggggagaagaggaggggtgaggaagacatgatggggcagggagcttgagttgggggaagaacagaagagagaaatataagagataatataatagagggagatattataggtttaaagagaaatcaggcactagggaaatgtctggagatatacaaagatgacaccaactaacaatctaagcaacagaagagaggctaccttaaatgccctcttctgataatgagattgatgactaattcatatgacatcatatactctccatccagcagctggtggattagaagcagacacccacagctaaaccctgaactgacctgaaatccagttgcagagaaggaggactgatgagcataggggtccataccagggtgatgaaacccacagaaacagctgacctgaacaagggagagctcttgttccccagactgatagctgagaaaccagcctgggactgatccagaccccctgaatgtgggtgtcagtgaggagaccttggaaatctatggggccccttgtagtggatcagtgcttatccctagcataggaatggactctgtgagcccatctcacatggagggatactccctgagcctagacacaagtgggttggcctaagccgtatcccgaaggttatgacagattttgaagtcccctatggaaggctttaccctccctggggagcagatagggtatgggataggtagggtgttagttgggggggggcaggggaggagggtagggagagagacctgggattaacatgtaaaataatcttctttctaattaaaataaaaaagagctagttgatgacaagcctaagctagagatcaaacttttataattaataacaagtctccatatcattatttgggggatggcaatccaaagacaatccatcaagaaagtttgcctttcctcagcctctttccactttgagagctggtaccctattagaagccttgttggtttacaaaataaatgtcactatttatttaaaaaaaagaaaagacaagaggacccctgagtcttgacagtcatctaatctttctgaattggtgagacccagattcagtgggagaatcttaaaaatgtaagatgggccgatggagaaagacactcaactcaatgtagacttccatccttcacacacacatgagcatatgtggatgaacatatctgtacacacatgagcatgcactcagacaaacatacactttaagacagtttacttaatttagtttgtgatccttttgctgtccagtgtagactactcttgtctgtcatctgtctctgaatgagtcatttatagttacagccacttttcatctccactaggcagagttattgtcctgtttacaaagtcttggtgattcttttgaataagtcaaatttgttcttgaatcaaaatttccagagatccaaagctatacttagaattagaaaatgcatgcaaattgtcgtatgtagatcctagatttgatcaaaaaaatcaacaaatgttgattctcaaactgcaatttaggtattggaaaattatctatgatattatgatttactttcatttcattttcatttgataaattcatctaaataagctctagctagtcactggccaacaaggaaggcactcttcacatatgggtattttaaaagtaataaaatcacattccatgtgctaattagctatatgtgattggtacacaccctatcagagtgcatcctgggacataactacaagtgtgtgatgggacatttctattacgttggagagtttttctaaatcatctactaatctggagcaaacatacaactttggaataagtcatcatctgtgtcacccttaaaatgatcacaattccaacaacttaaaggaaaaagtaaccacataatttcatgtgtaaaaggtgcattcacagctactgtgtgtctgctctgtgacctcagagtttgctgtggaatgaacaatcccagatacaagcacaggagcagagccagagcatggactccaggcatgctgttgtttaccacaggaccagagtatataatccaggatgctcaggtcagtgtgagacctgaattttgacttgcacaactcaccaatgttgtggaatatttgtttaactatgcaaagatgtgttgcctttgcttaactatgtaaagatgtgttgtatttgtttatgttggggaataattatttaactagtaaagatgtgttgctgctttaccatgcctgcctaaggtacctgattggtctaataaaaagccgagggaggaggcataaggcaggacttccagggccatatagaaaactgaaacaaacaaatacacaaaccatgaaaataaacctaagacctccacaagacagtctctgaaatgaatgaaacagtgaattggaggagaaattccaaaatatggagaaaataaatcatcaaaggaactaaaacactgaaaaaataatgcttgtgacaaaagaaatggtcaattgagtgaaaaaaaaatcacatcagaaaacatcagcaagactatgcagaacaactatcatctacacggagaaaaatcaattacatccatcaaattgaatacaactcttctgatagcttcattcaataattttatagatagatagataattagttatattgttttgcattttgagaccgaatctgagggaaatctataaacactatagctaaatatgttcattcatatttcatatttttgaggatatattttatcttatgtgtatgagtacttgcctgcatatttatacatatattcatattcctgnnnnnnnnnnnnnnnnnnnnnnnnnnnnnnnnnnnnnnnnnnnnnnnnnnnnnnnnnnnnnnnnnnnnagctgaactcacatcctgtagaagaacagcaagtgctcttaactgctgaatcatttctccagccccattcatgcatatttaaacagtgtatttaaaccaaacattatttaagccaacatatatgtctgcaaaattatgttttcattcaaggaaggtcagatccttgtgtaagtgggaaatccactgagccaccacatgcagagagtaaagctggagaaacttgaatcatctgggtggagaggaaggagtaacgggaacaggggtcaccctctgaagcagatacgatagtcactctatcctcaccggcccaggagttgcatttcactgtgcatttatatacaaggctttatgtgcttacagtttgagtttactcaattcatttattgcctcttttgtgctcaaccttcaatcttagcactagataatgtctgctctccagctgctgaagaaggggtgtgtcagttcataccccagaacacctccaattcctacttcctacctcttgacctttgtagttacaattcacactgctaggtctcagttcactcagaataaccgagtgcacagatatttattctgattctctgtctttactaccatgcacatggagacagacacagaacaaaacatctgagcagagttcctaagtctctcccggagaaattcagaagacgctcctaagcatgtggggcatctctgcatgtaaaacaagttgtgttttatggggtcagttaccaggatgccaatgccattttataggtccagcaggaaaagtgactgattttatatctatttccacttctggactcccagacataaaatggaacttacaggatagcatagcatgaaattgaagaaccatgttcaaagatggaaggtagaatctccactaaaaaaaatctgtatattttataaaaaataatacatacagacatcatggtatatggcccatatgctcacatattctcctacaactggactgacacacctcaaatggggaaatacatgggtctatagtacatttcatgtacttactcagccacattttaaccatttctatatatgtgtaggtatatatcttaggaagtttttagagcagtaggtttccatactttaaatgtctctagaattatttattatgctgtatagtccctcttctatcgtgtcccctcatcccaccataatgtatcccatcatgttccattattccccattagccctttataccatctctaacaacatcccaagggccttttactaattccttgtcctctgtgggaattttttaatgatttacttattcttttaagtttcattttacattccaaccacaattcttcctcatgaggagtcaacaaagtctgacacaatatgttgggcagggccaagcccctctcccatgtattaaggttcatcatggcattccaccatagtgaatggactccaacaagctagctcatgtaccagattcgtattgtagtcctactgccagaggcccctctgatagtccaaggttcacaactgtctcccacctatggagggcctagtatggtttcctggagtctctttcactgtcagtctagagttcatggagttccacgagcttggttcagctgtctctagatttctccatcatgatcttgatcttccttgctcatatattccctttcttcagctggactcacagagctcatcctggttcttggttgtgatctctgcatcatcaacaatcatcaattattggataaaggctctgtggtgatagttagggtagtctccaatctgataacaaaggaaggacagttcaggtaccctctccactattgctaggaatcttagctagggtcatccttgtggattcttgggaattatcctagcaccaggtttctccataaccccaaagtgactctctctattaagatatctctttcattgttctatggctattttaaaggaagccttatgtgaagatttaaagctgacctccataaatgagagaaaatatttgacattcatatttcttgatcagagctaccccatgccgaatgattgtttccacttcaatccattcacttgaggatttcataatttcatttttcttaacatctgcatagtattccactgtgtaaatataccatgtctccattgtccactcatcagttggtaaatacctaggctgcttccacttcctggatgttatgaaaagaaccattatgaaatctttcgggctttctgaccagtctcaatccaaccactccacagttttgtacctttgaagctggcacaggcttgaaggaatatgtctatgaatattgtctctggtggcatcagggctacctgagtagcaggtaagtatgtttgttctcatatgaaatgtttctatagccagtatttctaaagtaatctctaaaatgtactgatcaaaaggtgttcttataaatttagtgtaaggagtttactagtcaatctgccaaacaccttaccaactcttttgtgaaatgttctctccaaatgtaatatggccctaaaaaatgcccttcctcctcccctgctccacctatacattcagttcctctgataatatctaatccttttatttctaggctaagagaaactaactatactcttcataaaatatagtaaatgtaatcaattacgtgcaatatttaggattggtggctttgacaaagtaaggttcacccagagagagggggaagacagtctctatataacttgctgaattttaactgacttcggtactgattcagaataaacatatgtggcaatatgtgtttatttacagtaggacttgccttataaccccagatggccttaaattcatggttattcccatcatcctccaaattctggggttacaggagtgaatcactacaccacactgaacaggccttccctgccacatggtcctattatgatatattgttttaccacaggttgaaaagcaatagacaaactcaccatgaagagaaatttctacactgtgaatcaatgtaaacttcccctctttagaagttaattatttcaaattattccaagcagcttgtcttagtgacagaaagcagaattacacacttaaggtctgtgtcccatgaaaaatccctcccacagaacagtatgaatccaaaacaaagtaagatttttaaaaatacttataaatataaattttgacagaaaaaacttacaggataccctcaaagaataaaataataaatacatagaaaatcatgcgcgcgcgcgtgtgcacacacagtggggagagagagagacagagacagaaaaagtgaaacagagtcaaaggttaatactatcataaatctacaactgccctcttcagaaactaacctttaggatgggaggccaagtaaacaaggagagactgagggagagtataaggctccaacatcagcataaattcagtgtcttattggaaacgctggttgtggagctgctcctctaacttttgtatttcgggtacattctgattcatgaatgcaggtgcaaaccatgtggagaatggggtggcagaacactgggtctgccaaatgcatttgaagaacaggaagagaggtgttgagcacatgtgaagaagtaattatcacagtgggtcgtggtgtacatcatgaattcaagaggaaataataataatcagcaggagagaataaaacattgctagagtcaggtagccactattccaaattgaggtaagagtcaattttactagcaaccttgaaaggtatgaaagacattacatttgtgcttagggaaactaagactctaatatgctagtaatcttttctgaagtgaatatatagttagaaattaggaagactttaatcccaacctgaatattcaggctctgagtctgattccctgccctgatgtaattagctcccaggcctgttctgcaccaacttccctcctcagggaacaattctcaccaagggtcaattagaaatcccaaataactattagtcgaattctgtggcagctcatattttattttgatttttataccactataaatcccaattttacagaatcactgtttgctgctgtcagagagcacacttccctttaattgttttagttctgtcactccaagggtccatgctgtgaacagtagggaatatagatcacacttccagaatccattcatgctctctttcagtaatcccccatcctctttttatactcctttctgatgtgtcttcactcattttagactttcattttaagaacactaggaacagcctgtaattttgccatttcctggttctacacatcaaccccaaagtgccaaggagggccttctccagcagcctacgattctcagaatgtatggttttttgaatactttcctactccctgttaatgtttcaaagtcatcaacgtgaatgtgaactacatagatgtgtaatcatgactacatagcttcagacagcagtgctttggagccagttctgtacaaactggcacttattcttcagcaaatagcagtagtatgaacagataaaaatatctgtcgtattctaaaagctgacagaactgattaggaaactgttgcttaagtcagccgggtattattttaactgaggtcagagaatggtgaatggttccttagtcttccaggtcatgtgcagccttctttacagcatccatttgctaagactttaaacctttgggctttagaagatgctctctaggccaataacaccagtatttgcacctctcagaggacatttgccaagtatataaaatattaatcaagcaaattttccctaaacttatttttcagaaatagtgttattaaggaacagaagtttgttccaggaggaataaaataaagccttgttttaaaatttgagtacagggaagaagaaaggggggagaagaaaaagaggaatcaggaagactgagacaggaaaggaatagaggagagcaagaaaggagataccttgatagagggaaccagtataggtttagagtgaggtctggcactagggaaatgctcagggatccaaagggatgaccccaactaagaatctaggcagtagtggagaggctgactttgatgcccttcccctataatgagattgatgactaccttgcttgcctttcctagagccttcatccaggagctgatcaaagaagaatcaggcacccacagctaaacactgagccatactcctggaatcagttatagataaggaggaggggtgagcaaaggagccaagaccgtgccagagaaacccacagaaacagttgacctggtctagtgagggtacagaaaccctagtaataaagcttcggaaccagcattggacccaaaccaagccctctgaatttaggtgccagctaggaggccaagacagtctatgggacctctaacagtggagccagtgtttatccctagtacacaaatggactttgggagcccattccctatggaggggcactattgcagcccagataaacgaaagagggcctaggtcctcccccaaaggatgtgacagactttgatgatcccccgtggaaggactcagtatccttggggagttggtagggggcgtgggaggatgggagggagagggaactaagattgatatgtaaaataagattgtttctaaaataataataaaataaaatttgagtgcagaactctaactgtcctccatgtccaccctcactgtcccaaggatgatctgtgtttagaagatgcgcttatcttggtatttcttcattttcatttaaaaggccttatttggtctttttttgagacagggtatttcagtggctttggaggctgtcctggcacttgctctggagaccaggctggcctcgaactcacagacatgttcctgtctctgcctcccaagtgctgagattaaaggtatgtgccaccaccacccagctttggtcttatttttatttcagctattctacccaatagttttctcttccacttacttataagttctcaggagcttttgtactgggtttttgtctacagtaccgagtccctgccagttctagagaactcatttcatactgtctttctttttctcaagcccctggcacagtaaatgtgaaatactgcttcacagacactacagccattgcatctgtgtggtgaacacaatttaattgctgagagacaggcctactgtcagctactaaaacaaatccagtgacaattgtaaggtgagagaaacaaagaaatcccatatcacctgtttgcagatgaccatcataggaagtcaatgctagacaagggagatgtcatcagcagagacagatcagaattgacaagcaacacatctaaaaaagtaatgttgaaccacagatagaaaaataatataaagcacacatttcaaataaaagtgtatgaacacacaagagacccatctaaaagctcataccagtacaatgaacataaaattgtaagaaggaaatcacatcaaagaggtctagctaaatgtggctgaggtagaagatgcagtatacattactcaaggtttgaagtcattttttaaaagcgtacactgttccagtacctcagaccacctcttctataacacaaagtgttacgtggaaagtgagggatgattcaagttgtgtgaatggaagcaaccttatccactaccaacaaagtcagtaagtggccctcagttggaacatacaatacatactggtaacagactccaatgtccactgcagcacctcaggaagagttcagggatccaaagaagaacaatgaaccttatgagaaatctcggagtacccagatgcccactttggcaaatcgcatatgtcatgctctgcacaacttcagagactgacctaactagggcaacagggaatgaagaaaggacagatacacagacatatttaaagaaatgctgacattgggtgagctgtgttcactttgatggagagtaccagttgctgctgcagcaacccctatattcatcatgtttattttataatctgaatttagagtcaggtatcttgtatacagctgaaggaggaagcaggtttacctaatcttggagggagcctctgtaggggcagcctcaggctgtagttacccagatgaggaagctgtggttgataatttctgcacacactgacaatcatccctaaacatttgtaagtggaacaaaggaaggcttttctaattccctggacctgaccaggggaaggctttgccattccgatgcatctgaggcactggggcacttaacatggctgtgcttatgtcaacaatacactttcactcagtaattcatccactcatactttcatacagggcttcctccactccccacaaagaacaatttcactggtgaataacttggcaaagttgtgagcttgtttactgggcttgcttacagagcactggtaagaatttacttagagaagcacagatgaccacagccctgaaaagcctcaccccagcaagtgttgagatgactttctcacagctgcattaatggcctccccacttcaggtcacattctaccttctatgtattctggtacccctgagaccatatggctgtcctgtgctgtttgtttgcagaatcgaatacaggtggctgggaggtgcaggaggagccagctggacattcatgtgaaaataaataaccctcctcactcctccttttatgagacaacattaacatccataggcatggtcttagggggtcagttaaaatcagtcacatatgctctggtgaagacactctgcagtactcaggggatagaactctacagtcctcagtagtaatatttttttcattcatttcattaacaggacaaagcaagaaagaacttagcactatccaatacattatataccctcacaaagaggctgtctcaaaattaaccaccacaaatactgttttcaggaccagaagcaatgttcatctctttgtgcttttgttttctgctattttgcagtactggagtgagtgattctatttcacagggaagtgctctgtgatagttaatgagactttttataagctaggcatctttccaggcactctacatgtcttatgttatttaaggctagcaataagtctatggagaagatattattatctctagcttatagctttaaaaacagtaagacttccagtcaagagcagaaggcaattctgtgtctctaaaagctacatgcatgtgtatgtgtgcacatgcatacacacacacacacacacacacacacacacacacacacacacacacttacaaaagcctaaaagaccaatattataaatgtgcagccctactaaacatgtaaaagtaatacttcattgcagcttgaagagtagcaaaactaaagaccaaatgagtgggggaagaaaggtggcttgtaaatggccatactttatctaaatctctcacccaggtctctgtagtaaaggttccatctgtagtccatagcattactgaaaattggtagaaccttcaagaggagccacatagggaaaccttagatcattgaagtcttcaagtgaactttaaaaggtgggattacagtgccctgttttctctatttgcattctggccaaagactaatgttttgctatacaaaagttcctgtgatgatacaccccccctaaacaataaatacaccttgatcatggactgacacacctctaaagccaagagaccaactaagccttctctatgagttaatttatgtgctgatcagtttgcattcagtctatggagaggatatagcatcattgtggaaggtacaaccaagcaaatctactcacatcctggtgtcaacaaagcaaagaaagaatgaagtgaacagacacaagatacacccttctgggacaggcccatagtgaactgcttcctccaagttagtacctactctccaccacctcccaaaaatgtcattaacttctgactgcataaatacactaatccacttgtaggattagagctctggtgaaccagtcactttctgaagcccatcatctgtccatcaaacctataacacatgaggtcctcaggaaatccttcatctctaaagcataaaaatatactgcaagcatttattacagtgtcagaatatttacacaaagaagtatttactcagtcatcaaaaagaatgaggtcttgtcatttgtatcaaatgaacagaactggaaaatcttatgttaagggaagtaaaatgggcacaaaattcaaaaatcgaatattctctgctgtaggctgaatatagaaacattgactccaaagaataaagcaggatatgattgataaaaaggatgattgggaaggactatgggaggttgtataacagatatcaaaagacagctaaataggaagactatgacttattcctctatagagcagcaggttggctacagtttacattacccattatacacactgaaatgcaggaatatatagactcctaacactaagaaataataaatttataaggagctgtgaatgccaagtgcccctttcggattatctgtttgtcctgaattaccataaatatgtgcaattattacataccaactaaaattttaagtgaacatttaaaagctggactgatagcacaagattttaatctaagaactcaggaggaggagttcaaagacaaccttgttgacaaagtaagttccaggatagtccttaacaaccctaatagaagagaaagaggaacatcaagcacgtatttccaatatcaggaatgaaagcagataatcggtgcacattttatgttaataatttaacagaggtagggaatgaacagcccatgtgtgaggtcctgggttcaatctcctaggaaaatgtactggacaaacaccctgaaatgtagaatataacaaactaaagcaagaggtagcaggtaccctgaacaataatacatgtatcaaagaaattaacacataattaaaaatatcttgcctaggtgtctatattggtaaatttgattaatcaatatagaaaagacatttctatatactgttgaaatttttaagggggaaaaacacttttcaacttgctttagaacctgtgagagactaaagcacaaactaacaaaagcattgaagtaaagctacagtctaaaactctcatttacaaacatgtggaaatagctaacaaaatacagtaaagtcaacccaaaaaatacttaagagtttcatatattagaaaagggaaaagctattccatcaataaaggaaaagatatatagttatctcaataaacacaataaaatatttacctaaaatccaattatgtttcttcatctgaaaaattctccagaaaactagaagtcaaagaaagagcttccatttgatcagtttctacataaaacatctacactttttgtgatgattagtggtttaaaaaaatgtatcatctctaaagtcagagataaaggttaagtatatctggtctcagcatttctattcaacattgttctagcattcaccattaagtaccaaagttaaatagaatacatgaagattgagaaataaaacaaaactgtttttatttttaaattaaataaatatatacctagaaagttcaaatcattctaatgaaaaaaactattaaatctactacataaattcaaccaagtcctagaattgacactgacactttttaaaacaattctatttgtttatagtagcaacaaacacaaaaggtagtaaaaagttttaatcgatatgttttgcagaagcacaaaaaatgtctaaaatacctagaaataaatttaacagaatacagggaagcccactatttagaaaacttcagaatgttgctttgagaaactggaaaattaataggtcagaaggcatatacagtgctgacttagaagagtcaaagttatcaaaaatgtcatctgcccttatattgatccatagattcaatacaattcctgtcaacagccaaccacattcttgatagaaatttgaaagcaagtactaaaagttttatagaaatacaaacaatctacaataaaaaaagcagttcttaagctgatgggaacacagcttaattcttagtatatgaaactataataattaaaatggttttgtgatggcttagtcctgaagaatcatggtatcaccattttcttgtaattgaaacattccctcctgaaggttagaggcttgccaggcttaggaaactaagaaattatataaagctcagataggtcctagagttataaaatccccaagacctctccccaagttaagaaaagcagtaagcagttgctggggagaggagaccccctgtgagagcagttgttgaggggaggagatcctcatgaacattgatgctgcaaaagtactcaataaaaattcacaaaccaaatccaagaacacatcaaaaagatcatccaccatgatcaagtaggcttcatctcagagatacaggaatagttcaacatacaaaaatctgtcattgtaatccaccatataaacaatcttaaacaaaaaaccacatgataatctcactagatcctgaaaatgcctttggcaaaatccagcaccccttcatgtaaaagtattggagagatcagagctacaagggacatatctaaacataataaaggctatttacagcaggcctgtacctaacatcaaattaagcagagtgaaactcaaagcaattccactaaaaccaggaacaagacaaggctgtctactctctacatatatattcaaaacagtgcttgaagttctatgtagagcaataagagaaaaaaaaggagataaaaattggaaaggaagaagtcaaagtatcactatttgcagatgataccccccaaaaaaatctaccaggtcacttctatagctgataaacaccttcaatgaatccctgcatacaagattaactcaaaatatcagtagccctcctacttatgtgtacaaatgacaaacaatgagaaaaaaataaggtcaacacacccttcataatagggacaaataatataaaataccttaggataaatctaacctagcaagtgaaaaacctgcacgacaagaatttcaagtctttgaagaaagaaaatgaagatatatcagaagatggaatgatagcccatgatcatagattggtaggattaacatagtaaaaatagccatcttgccaaaaacaatccacagattcaatgtaatcaccatcaaaattccaatacaatttttatagactgtcccgcgcatgctctgtatttctcgccagcaagaaatcatacacgggacactcggatccttctgcaggaaagctttaatgcgtcttgagaggagagcataagcttaccagagcggagacgctgagccaagaatcccgtcccctaataaaggctggcagccgccgcctgggacgtgttaccctatgattggctgtagctcatccggccatatgacgccacggaataggcagagatcaaggaatggaaaattacccagcgcctgcgcaataatcttgtttacattcggtgcctgccggatgcaggcgccatcttgtaatggagaatgcagggacggctccctacatatccccctttttttattaattaatgataaggctttatatttttacaagcaaataggtcacccaaatgttgagggatagaggcagaggttgtaccttcccaaatcaaacaataagactgtgtacgagagtcgcgactaggctgttagcttgacccgaagcactctcgacctgtcctctgccgtttttctgggaaagggagactaggcaggtaacccttatgcaggacaacatgcctcccagagaagcctgcatattgggcaactctctgtgcgatgccttgctcgacatccctcatgggctgctcaagccaggcactctaccctgtgcaatgagcctaggctccgggtgtgcaagagctgtctggccagcggcctattgcttaagcatagttagccaaatatcagtggaagccccttgttccaaagctacaagcgcttgggcgataaccaccttgtctctcttagtttgagccctgagcctacagaccagccagagaagcaacaccaatccacagcaaatggctgcaccaaacaatcccatccccacccattccttaaaataggagacagctgaagcaatccatgatgacagtccctccgtcaaggacaggagttaatctggataatagcagctctcaactcccggggagagggtggagttccgacttttgagggtccaaaggggctcttcgggtgagtctttccgggatccacaggggattctcttcatcctgtggaaaaacacatatcgctcccctggatcttatgagaataggatccgggcctctccaaagaccagttaagacatctttccattttaccatctcctctgaggtatgacgcttggccgctgtatggccctgagcgtcggtgtttagaaaattaagggtaaagagtgccatggatattgcaactcttggcaccgagggtaaggatgctcccattccctccttttgtttgattaaataagacttaagtgtgcgatgggcacgttccacaatgccttgtataaggtaggccagttagatgggtaatttccatctgtctgcagaagtgctggaacttttgagaggtataagccggcccattatctgtttttaagaagcacacaggtggctaggtaaagtcttatttctgtaatacagctgaacttccttaaacagtagcttaacttctttctgaggcagggtttttctgtgactttggagcctgtcctggaattcgatctgccggaacaggcaggccttgaactcataaagatccatctgcctcttactcccgagtggtgggattaaaggcgtatgccaccaacgccctaaacttaaaggtgtgtgccaccaataccctgagcttaaaggtgtgtgttaccaacatnnnnnnnnnnnnnnnnnnnnnnnnnnnnnnnnnnnnnnnnnnnnnnnnnnnnnnnnnnnnnnnnnnnnnnnnnnnnnnnnnnnnnnnnnnnnnnnnnnnnnnnnnnnnnnnnnnnnnnnnnnnnnnnnnnnnnnnnnnnnnnnnnnnnnnnnnnnnnnnnnnnnnnnnnnnnnnnnnnnnnnnnnnnnnnnnnnnnnntacattcggtttctgatatgtaattctggacttctttaagattgtcccaagccaaagtccagaaaaatcatacctctccgaatttaccaccctgcagttctgaatccgcctcgttagaggggtctccgaggtgctggaaatgttcacatgttcccgggtttcggcaccatatgtaccgcgcacgctctgtatttctcgccaacaagaaatcatacacgggacactcggatccttctgcaggaaagctttaatgcgtcttgagaggagagcataagcttaccagagcggagaccccgagccaagaatcccgtcccctaataaaggctggcagccgccgcctcggacgtgtcaccccatgattggctgtagctcatccggccatatgacgccacggaataggcagagatcaaggaatggaaaattacccagcgcctgcgcaataatcttgtttacattcggtgcctgccggatgcaggcgccatcttgtaatggagaatgcagggacggctccctacaatagacattgaaataataatactgaacttcaaatggaaaaaaacacaatagctaaaacaatcctcatggggagtgtactgtgtatgtccatcttattgaatattgaataaaatactgtttggccaatgagagagcaagttagacaggactaggagtcaaagaggattctgggaaatgcagtagagaagtggtgatccatgcaggaagtgatatatgaaggagactcatatttaagcaagatgaaacaggaagtatcttttttccccttcctcctccagcagtgccatgtgagccaccagcaagagagggtgccagcgaaaggcatcctctataagataagtcttataaaatatataggtttatgataattaagactgagctaacagatgagaaatcctagtcattggtcaagcagcatttgtacctaatacaagtctctctgtgcattaattgggatcctaactcaggcttgcagctggtgtaaagcacacacatggtggtggggcttgggtggcttttggtggaaagatttatggaaacacaatcttgcaaaacttctgtacaacaaaagaacttctgtaaatatcattattgccaatttcaagctgaactacagaactatagtaataaaagtcacagggtatttgtatttaagttgatcaatggaatcaaaatcaaagactcaaacatgaatcctcacacctatggacacccaatttttgataaagaaaccagaaatatacaatggaaacaaaacacatctctaacaaatgttgatagtctaactggatatcagcatgtagaagaatgcaaatagatccatatctaccatcctgcataaagctcaagtccaagtgtatcaaaaatctgaacataaagccagataaaatttaacttgatagactagacagtgagaatagccttgaatgcattggcacaggagacaacttcctgagcagaacaccaatagctcaggcactcattaacaatttataaatgggatttcatgaaactgaaaagtttctataaggcaaaagatgctgccaactggacaaaatgatagcctacatagagaatggaaaaatattttcaccaaccccacatttgacagagggccaatatccaaaatacgtgaagaactcaagaaactagacatcaacaaaccaaaatccaatttaaaacagggtatagttgggcagtgatgcatgctattaatcccagcactttgtaggcagagacaggtgaatctctatgagttcaagtccagcctggtctacagagtgagttccaggatggccaagtctacacagagaaatttggtctcaaaaaatggtgaagtttcaacagaggaatctcaaatggctgaaaatgattaaagaaacactcaatatccttagccatcatggcaatgcaaatcaaaattactctgagagtccaccctacacttctcagaatgaaaaacacaagtgacctcatgcttgtaagactggagtaagggtaacactcttcccctgttagtgagagtgtagacttgctcagccattatggaaatcaatatggagattcctcagaaaattggaacttgatgtacctcaagactcagctataccactcctgacaaatacccagaagatgttccatcctttcacaaggacacttgctccattatgttcatagcagctttattcataatagccataaaattgaaaaaaactagatgtccctcaaccaaagaacatataaagaaaaaatctggtacatttacacaacggagtattactcctcggtttaaaaaatatcatgaaatttgcaaacaaatggatggaactagaaaaaaatatcatgggtgaggtaacccagacccagaaagacaaacatggaatgcattcacttataagtggataataaccgtaaagtaacagataatcatgctaccatccatagacccagaaagtcctagtaacaaagaggactcaatggggctagcatggatcttcctgggaaggggaaacagaatagatttgtggatggactggagacaggtggagatgggaacaggatggattaggtatagaggtggagggagagagtactgagagagataactagaattgaagtgcatttcagggatgatgttgaaaactcccagaaatccatgagagttaccctagataagactcctacaaatgggggctatgaaacttgaactggccatcttctataaccaagcaaggtttccagtggaggaactaggacaccaacccagcacaattccttcgacctacaagtggccctgcctgcatgggagtggccaaccaatgactggtccaaattgaaacccatgctatgagagggagtccataactaacattgcttagcagaccaggaaccagagactggataacccagacatcaaggatagaaccaaacatggttgtcaaacaaagaagaaaaaattcagtgaaatgattcttaatggtactatactcataggctagcataaccttcctcagagaggcttcatccagcaactgatgcaagcagatgcagagacccacaaccaaacattagacaaaggttggggaaaacagcccacagaatcaactaaccagggctcataggggctcacaaaaacagaaccaccatcaattatgggacttgtatatgtctgaccgaggccttctgaacatgttatggttgtgtagctttgtgttcctgtggaactcctaacaggggaagcagccactgtttctgactttttcctacttttggaacccttttcctcttactggattgtctcattctgccttaatatgaggaaatgtgtctagatttattttaccttgatatgccatgtttagttgatatccctaggaggcttgcccttttctgaaagggaaggagtggatctgggggaaagaagacagggatggcttggaggagaggagggatgtagtatatgaaagaagaataaaaaagaaagagcaagaataaaaacagtgactgggtagaaatcataattatttcatactatcaaatagttgcatatattaacttacatactagattactataaagaagatataaaagctgaaatgagcaaaaggaaaaattcaatatcaacctccctttaactcatcactctaatggctggttccaaattgctgcttagggctgagctggtagcaatagtattaacatgacagtcttcctagtcattgtcatcccaccatgaactggtgaaagaaagggttgtctcagttagggtttctattgctatgatgaaaggccatgaccaaaagcaaattggaaaggaaagggattatttgacttacactttcagttcatagtccattattggaggaagtcagcacaggaacacaagcacaactgggacctggaggcaggaggccaagatgggtactgctcagcctgctttcttatagaacacaggaccatcagcccaggcatggccccagccacaatgggctgggccctcccccattaatcacaaattaagaaaatgccttacagctggatctcatggcagtatttcctcaactgagacttcttcccctgatgattccagcttgggtcaagttgacagaaaaccagctagtaaaaggagtgcatatggcagatgtgcacattcactatggaattagcatgtgtcatgcccactcatacttcatgggcaatggttagcttacaagctgcaatggccaccagggagcctggaatcacctgtctagcaagcacagtgcagctgcaatttaagcaaaaggaaagaggttttggtggatagcttgcatgttttgctgcatgtggatttgccagaatttattgcaatttttctctaacactggctctgtatttatttgtccttactactagtgttgttatttacactaattacaggaaatggaaataagattcaataaacaggttcactttgctcttctctgcaggctgtgactcaactccttgcattttcattaggacataggtaagcaggctccaatttttcccatcattcctgaatcagcaatggctataatctgatgtgattgctctttcctgtgcctctctgctgaatttaaaattatagctcatcactaattttaatttacttttctgtgaccaccagaaactttccaattctgttatatacttagttgcatgtatttgtctctgaattagtgctttgtctcccctgcctacttctcaacaagctaatttgtctttctgctattggctttatcttgctgaatttacatttctaaaaatgaaaatacaaaatattttgtagccttgaaaacattgcctttcagatttatcttcccatccctctctctatttcatgaaaatcaccagctctaacatattctacagggcaatgtctcaagcatgccagaacgtccctgtgttctcctgtaaatcttaccatgtaatcctgggcttagcctgactttacaaacagaataatggatactgcatgctaacatttcatttaacagttttaaaatctgtccacaaaaattaggtatcaacaagtcttcttgtcaagaaacacaaaatcctcctcctcctaagactctaccatgccagcacacaaactgcagaggactctgattcctgtgggagaagagtgctcgattctccagtaaggaaacacaaggcctccagtcaaacatagtgtgtggatttgagattgatatgctaggcatttgacaaacttaatttgttccccaaggatatgtaatcagcattgcaaaatttctcatacagctctggggtgagtttgcataatcttccattcaacattcaggaaaatgcatcagtggagtacatccctgagacaaaataactatgtctacctttctttagagtgctcagagaagtttacaagccagaattgagccagagagcatttatgaggctctgaggtgagggcaaaccagttttctttttaatgcacaaagagcagggtaagaactgctaaagaggcaatgaaatagctagttacaaacggaagtgctgatgtcaggaaagactccagccatgactgctcttctatcctggtcatttaagagggaggactgctcaggctcttctcttaacacctgcaagcagcacaaagaccctgtgccaggccagtcatcagataataggacaatatcactccagtgagctccagtcttattccttgcaagacacttcactcaaaaagagacaggaaaattaaaatctccttgcaaggcttgttatctctttctgagaagatgataagactcaagtttgaagtgctattaaaaattggattaagaataatttgacttaagtaggaatatcattttagtttctctatgaagatatgaaaaggggcaatatttagaatggctgacagaattcaatacacattttaaaatatgtacaattagtagaagatagttttcttcccaaacagttagaattttgctacatttaactattgtaataactatatatataactaacattaagaatggtaacaatcaatgaagcagtactctaaatgactgtggtatacttgcaaattttataaaatatattgacactgaagtatttatttagttgtaggcatcttagaatgtgtttttctttaatgtttccttcaaagactgtagaaataacttacttatcaagtcttctaatgtcttccaagatattactcatcctactagatatcagagaaagcctgtaggttctgccctcaaaagcacctccctctgcattatttgttaagttttcgtctttcctctctcatcctggcgcattctgcattgtgctgggcctcctgtcttccctggtaattttttaggacattttcccaccaacaagcaaatttgacaacaccactatcaaaactgacatttaccctttacagacaaaataaaatcaacacctctcagatgagttataaaatctcatttgacaatataatcagtgtctaattcctgcatctgtattttctatacttcttatgtattatttgttttctgagatggtgtcaggtatcccaggttggcctggaagttgctatgtaactgggaatcctcttgcacttcttatccccctgccttacctccttcaggctgggatacttggcaggtgtcaccaaacccagttttatgcagtttggatcaaacatggggcttcatataagctagtggctgctctatcaaccaaggtatatcccctgcattgtctgttttgttttgaacattatcttcagttatgtacaaatccgcaagtagactattgagaatttgttcctaaaataataaaatattttagatatactatctatgacaatggaaagctttcctggcatagtaacattttactagcaaactgaccatactaatgctgtaggaacccaacaggctttaggattaggcaggttgtaaacaaatacaaatcaatgtattactcaataagaaaaaaatgatattctatgttttctgggttattctataaggaataaaacatacatagtaatcaagaaagagatttgcattaaagtcactttgatcgtatgttaaacttgtcttctttccatcaacagtgagataaacgtttccaacataaactcttagattccccttttcctagatagcgaagtaactgagctattttaagattcatgtctattctagcttttcaacttcctgaagcgagaagggtttaagaaacattctctcactttagagttttaattttggccattgcagtcacattcctttaacaaaggtttcttttttgggccctgttatgcatgactcccattcaaggttttatgttctaatctgacgtaatttaatttagtacaactccactatcagcactatgagatggggaacatttcatttttaacaaccatgtaaccatttttaaactcttaaatgctttaacgttttttctttaagtaatgatttcccagaatagccctttagtcatagttaagctttgctcttagaaatgtgtggagactggaaatagtccaaagaggagcagtcaaaatgaataaaggagcagaaaataaattatctcagaaaaagttggagttaaaaatggaaagcaaaagtattatatagtgggtctatttcacccaactcttgcaactcaaagttaatgggtttgcgaaactgccgtggaaagatgagcacacaaacccacagacacacaacacacatacactctcacacatttccaaaccacaaggagcaagaagcccccaagttctatcattaaccttgtgatcttccttgaaacttgagatctagaaatattccacaacatttgagctcactttaatcaggtagtaggaatggatattctgaggattgtttcacttcacttccagaaggacctctttaaaattatttacttgagttttaattacacatctagctgtgcattattaagacactctgatgtctgtgaaagtcatgtgacactcagtacctgctatttccaagggaaaaggagatcaaagcaaaactgtcctaccttctcatctcaagcaaacacaagtccttaatccctagcagcagaagatacagagatggagaagagctggagtgtctccctaggaggcagggaatcaccagaaccaaggaaaaacagtcccgacaaatggcctctgactttctgttggattcactctatggaagtactggccaataataggccacgagtaaacatgattaagactttagttcctcaattcaattcctgctatacagtggagattagctgattgatctcacatgtatccattgttcctctcatgatcgttccccatgtcagtagcccctatgaacatttcacctccttgataactgctcctaacatctattaggcctgagcactgcagtctgccatattgggcacagctttgggcataactttgcaagtagtcccgttgctaaactctactcaaattacccagttcaaattgccacaaactgaaattatctggggtcatgatggtgcagcacaccactcctagttttaaaattgtaccatatactcaatgaacatggacacatacacaaactttcccctaagctggaaaattgtgttttatctacaatccattgtactgttgaacaagaaaagaaacccaaaaataaaaataaacttcactggggggtgttgggggagttagagagagagatgtgggtagatatgattgtgtttaattgtatagacgtatgaaattatgaagaataaagaaaaatataaaaaagaaagaataattaaaatagacttcataaggtgttatgttgactaacacaaacattagctctcatttagttttgtatatctcaagatgaccctgtttacaaagctgatcattgcttaggaaagctctcagacttgtcttttgaagtattaaggaatatattgattattaagattaagtaattaagattaaatcttggtgcttttctgataattcccataaggattaagcttccaagtttgtccacattcatcaatgtgctgaactactagttccagttaatacacatctaggcaacacattgaaaataagatgttgtagaaaagtaaaatcccaaaatggaatgaaatggaaaagtcataattcccctggctctcctcccccagaaagttcaacagcaggtatgctaagagggtaaccatgaacccatgtctgctacttgcctctcagaaaagtcagtgatttgaggaaatgctgtagagatggtggagagaggaatgaaaacatttgtgtgcatctgtgtggatgaactcagcccagtatgagtttgagggcaacttgcaggaggcagttctctccttctaccaagtggattccaaagatagaactagggttgtcaggcttggcagctatacttgcttagccaccttgtccgccttcaactcttccttaatgttcctatccagtgtactttccactcccttcaatgaaactgaatggtgcacaacaatggcatctgagtccctaatgtgctgtgagcatttagggaaccttgtagtaggccaagcactttttgagaatcacttgtgactcataatcatccctgtgatgagctgtagatactaataaaacaaagagaatgcagacaagtgaagcagaggagactccatgaattattcagttaggtgtcttggcagactaacattctaacctcggatttaaaaacacttgagccttcctttcaaagattctacaggctcataaactctggcagtttttactagtacacattacataactcttctcagttagagcaaactgttatgggaagagtctacttataatatttgtatcttctagactagcagtgtggtagttctttacagtgtgtactgggtaaatgaaaaagataaatatcctttaacatttgtttttaaaaaaaaaaagtgaacaagataaaggaaccatgtagaaagtgcatcctcgccaatacacacacccgaagtgttacaaccatcccttaatctcacaagagatctagctgaaacttagttctcttgataataaatcttgagctatctaattctgaaccattaccaatggcagttaagtgcctgtctgtgcatttgaaaccaagctctgaagatcaataaaactcaaattgctttttaaaaagagattctacccacatttttaaatacttcaaaagcaagatcaggatcacaggttgagcacaaaaacagaaaaacactaaagattcccaaagcagtctccccacagaaatgagtttacactcaggcaacagccaaactaagaagggacacaactgcttcccaaaccaacatcagaggagaatgcacttcctccatgcagggctgaattcacacacactcaatgctttaagccctcaaatcacactctaaataaatgcttttcctaataataatctacctcattgtcatccccaagcccagtcccaaaagaatgacaactgcacctgattgtactgtcagcagctaagagagaacctgtgagtcagtcggcatgtaaaggaaaaataaatttaaggaatggatgctgtaatctgaaaaagggggctgttcttccagtgtgttcaaaagagaagacacattgtgggcgggagtcgcccagatatccaatgaatctcactttcacatttataacatctctcacattcttttaatttttctgtttcaattttaatctcttaatacatatattatgcatgttttgaattatttatccttgtggaaaggagtatgcaagaccatgtggaaggagtaacatgccagttcccctcttcacaccctgtggacagatctttcagtgaccctggaacactacacccattttcagctagacttgttcagcatgcccagtgaccattctgtctctgccacaaatcccacagcatggagttcactcagaggttcacactggctgtgtgcagccatgtccaggtttatacttggttgcatgggatctgaactcaggtacctgtgctggctcactgatcattctagccatctctctagccccatctccatttaacatacatagggaaatgactaacaaaatcaagcaaattcaaataccatggcctcttaatactccacagcagtttgaagtatttttcccttgatgtactacaatagttctcacattatggaaactatcttgggaagcattttttaaaaaaaacttaaggagctaaaagaggttcctagacctattaattagcatcttagatggcagaaatatgaaatgataacgacctgaattaaaggatttagagagagcattttaacgagaaagataatctttctctccacctgggacaactcatataccacctgttatgctgcagggttatttgctgttctcctttcattctctgaagtgttttgtttgggtaatggattgtagtgctctaattacagctcactaatgataaagatcccatgtcgttcataattgcttgtggcctcactatttttcttaactatttatcttacttttcagacttcctttcctattgtgcatttattttatcatcaataaagtaagtgggccataaaataaatttatttattatcacaacaaattgtcatgtttttataaaggtggacttttgatctgtttaaacctgtgcaaataaagatcacgaagatgataaaattttataagatatggcatgacagaaaacacccattagaaaattcggtatcaatttatgcctaaagtagattgctcaaaatatataattatccctagcttcttttaaacaaagcaatcttttcagactgcaatcttaaggccaattttcccacaaaattaaggactccacagcacacttgatccattcatttgaactacctcagccatccatgcagctctctccaaagtcaatgaggccgtgaaatcagtattgaccataaaaacaattgaaattaatgaatcaggctcataataaaattgtatgcctgacccagagtcggcagagaaatggataatcattttgaatgtacctttacaaagatggccctataggtctgtcatgaggaatttttcataaacttgtttaacagcaaagggcatagaccacttcattcattcccattcatttcttcactcttgtataaactctatttttataatatcataatcaatgtgaaatgctctaggcaatgaagaaagcagaggccctactagctcacaagacaacagagaagatataaaacacacgtgtcaaagagaaatatactttaaatatggcccaggtacttgttcaggaaatcaggagacagatataaacacctaactccagcagtgtgaaatactctgggaggcacatggtttgaaggcttgttccagaaggtgctgtgtggggggactgtggaaactggagatggtgggagacagctacagggagtattagaagtcacacaaggcagggatcttgtcgctggctacttcttttctgactctctgaggtgaattatacatgaagtgaccagctcttctctgtcacaaatccctgctgtggtgattcctatacaagcacaaggaaccaaacaaacatgaactgcatcctctgaaaccatgagtcaaagaaatcacttttttgtttcttccaggtatctggtcagtcacacaaaagcctggcacatgtcattcagcatccaactccacccacccagcttgcctctctctgtaccttcccctgaaagtctaccttcccctatatccagcgactagattcagtagccatgacctcacatcttcataggaatcctctgactgctgtgccctcgacatttatcttattccatggctccatattctctgagattcagcttaagcatttgtggcgtccagctctggcaagtgccacctttgaagtttgtcatttgttttttgtaagtttaatgctatatttacttaggatttcctggcatctagttccatacataccacagacatttattgaatgaatatatagaaatttgaatatctagcaatagttataggcatacagttagcacaaataaatagaagttagtttttttataattatactgtccatgtgctttcaaaattccccatctacatatgtaacagaaagaaaaaaaaacatattctcaaattaaaagctgtagttgagtggtgtcttatttataatggcaagagtgtgtataatctgaatgtctgactagaatgttatttagcagtataaaggaattaatccctgattcccacagcattgctgatgattctcaaaaccatgaagctaaacacaagaagcacagtgtgaagacagtgaaaccagtctgaactacagtgtgagaattagccaggaaaaccagtctgaactacagtgtgagaattagcccagttgttgcctgtatacacatgaacagcataaggacttagtgagttatcaaaaaatgaaagaagaaagcatagaattgagggagggatgtcttatggggattcaggaagagttagaagagtgaaacaggtattgaatatattttgttgtattgtgtaaaaattttgcaaacaataaaaaactattttggtggtgaagttttatcagatttttagtatatttaagttttattgacttggtttctcattttaaagaaatactagtttaaacttaattttttgatatgaagatatataatatatactaagatacacataatatgcaattatatattaagttaaagcaagtatctatttaaatgagaagacaagctattaaaacatgaacatatttttgtttctttgcttttgatttggaagggggttgttctgtttttagtttttagttttttgttttttgggtttttttttttatcaagacaaggtttcttggtgtagtcttagctaacctagaactatctctatagaccaggttggcctcaaactcagagatctacctgcctttgcctcccaagtcctgggattaaaggcatgcaccaccaacacctagttaaacaataagcacctcaaaatacagtctgaaaagtcacataagatttttattatatatttctagaatattcattttccttcaattttttgctacatagacattgattaagtttttgttgaataaggattttgtagtgtgctttctagagaatgaaaaggtaacttgatattttctctaactagagagtctcttttgacattgctgtgtgttggcaaagtcatgtgaccttataaggtgttggaggaaaacctttaaccaccactttacaaccagaataatctctaactacactctaaatatttgtccttatacccacagataaatgtagtcctctccctcatcaacggaatgtctttgcaataatcagagaccattataaaaaattacagccaatcaaaatgcagagttgtggatcccagacccaagaggtagatctacaaaagactcccacacataaggcttgggaacattggagaagagggattaggaagattgtttagagccagaaaactgggaagtttgctgtaagactgttttctggtaattcagaagcaacacccacaaaacctcaccaacatggctgcctaaacatgagctgaacaaggacaaccacagacatgccaaagtggatgaggaaagacagtaaggactcaatcctatacagaaaactgaaggcagcaggcaaagtgattctgagagtaggagaaatggtcctccccagggaaggacacaccaattggctatccagcaccaaatggtcagccctgaaaatatacatacaagtaacaatatgcagaataagcagcatattttatgtatttagaaatatacctatatataaatagacatgtatgtctatagcaataattaatgataaaaggaccatgaatttgaaagggaacaaggagggatgtctaggaggaattaaagggaggaaatggaaaggggaaatgatgtaattatattataatctcaaaaaacaaaagcaagttctttttaagtttgtcaattttagtaagtagttataattctttcactcctgagctcttacagactcacatgttgctaaaatatgcctttatattttacaaatttcaatactattttatgaattcctgcttaaatctttaaagcatcgtgtacatgtgactgtgtgttctactgaaaagcacagcagtaagatgagtcatttggcctgaacaagggagagcacatcgaccccagatgctgtccaggaggcctgtacaagactgatccagaccccagaacatggatgtcaataaggaggcctctgcactccagggagcctctggtagtggattagtatttttccctggtgcaagaagggactttgagagcccatcccatatgaagggttacactctggccctggacacatggggaagggcccaggatcagcataggcagacttggtggactttgctgagctcccgttgagggccctaccctgccccaaaaaaaaaagatgagtcatttgaccagatgtcagtgaaccagaatcctctgcctctacctaaaactgaactcagcctcatatctaagaatactacctactagcccaacactgacttccattttcaagttatctctttttcccaccacacactccatgtactaagaaccacaggaggcttacttagtaagaccctgagacctgtagctgtgagttcattttttctgaacttatccaggatgagcagttgtagagactataagttagaacctatgcatgctctaatcactggcacaaacttatgcatgccaagagttgacttaacatcacacaaatattctaccatacccaaactatgtcaaaaaatgccaccattttatcttagatttcaaaatactctccactggcatcgcatgctcctgacacggggtgaggaggacaaacccaaaggaggaataggaaggggtcatgggctgagcaattggttttccagttgacaaagcttacaattttttataaatatgatcatagtaacatacgactgagggtcatctgtcagctgcacagtgatcgttatcttcaacataagtggcagcatttatcatccagtcattcaacaaatattttcatactagtcctttaattctgatcattggagaggaatttccactagagataacctaaactttatatcaaataagaaaaaaattacaaagagatttttctggactcatggacttggtaacttttagtgaaattcattgagaagctgtgtaattctaaattgatagtgtaagtccaaatgtttcatacaagacacttaggaagtccaaagaatgagtttcttctctggtttcagtcatgacaggtacattatatctgccaaacacccgaacatttcacatgcatcttacctcaagctcataacagctacacaaaaacactgaaaaacaaagtacttgctatgtggcaagggaaatatatttttggtgatgtgaaatccaggaacaatgttcttcaaatagcttagggaaggaaatgaactgcttgctgaaaagatttttctagcaagcatttctctggagggtagatagcaatctatataaacaatatagatatgcaacacatactttcatagttctggggaaaaggtcttcctctgagattgtaaactggttgacatgaagctgataaactgattgattatttggaagaaactagactgcatgaaataagccaatatttgcaatatcctggttttcacactttggtgtgactctggaagatactgtgctctccaacacatatttttatggctttatcggtagctttatttcttgaaatctaaagaatttgtttgatttttgcctttggtaaatgtagtaagcaaagtgtattagatattctatccccaaaatgtgaactagctctgaaaaccacaaatattcacatcaaacaataacacaaaatgtaaatggttcatactgcaccaattataaagacttagaagtgtgaaaaatatgagatgacaagtttttcttcctcctttttggcacatctgtttccatctccttccatccatgggattatgtatggcctgtatgaattcttcctgttctagcaccattcagtgctgatcaccattgccacaactccaccccacaccctgaccatcattagacctacacaggggtggtgaaactcaggatgacataggtgaaggaacatggacaataatttcagttttatttacaaaattcagtagagagtgggcacaaaacatcatggaagcttttctccatcatactctgaacctcatcctccagaattccttcttgctcttgagacagccacagccctcctcttctcaagctacaagatcgctggtgttatttctatttcattctcatccacaatctattcttcttccttccacaataaccctttagtgtctctagtagaagggttctagtttttaacttaggagcaaacatattgaattagtctttggcaatgattctgcatcattctctgttcctaggagaacacctctccccctcaagcttcccagatgtgcctagacctgaatcccaaggagagcagacttgattgtcaaagaagagccactttgcactatgacaaaaattgagataaaataaccttgatgaataatggtaataataaaaattatggaaataagttatttgtgaaataagaagagcttgtgtataaagaactttcaaattttcactaaaatttatcaagactaaaacacatttttagtattataatttaaaaaatactatacacaaataaggatgtcttaaaagcctacccatatgtctatgcaccacaaatgtgcgggtgctcatagaaactagaagatccccaaggtactggtgttaacagatggttgtaagctgtcctgtggataccaggaactaaacccaggtcctttagacaagtagtcagtactcttaataactgagccatcactccagcctggtttattaccctttaataaatatctgttctttaaagttccatttcttctcacaaaactacaatgcaccgcaacctgaaaagaaaataatgttacctcatagagaacagctaatacatcttaagtcaataccgaatctcaccctttatgaaaaaaatatcacacaattgctcttcttttttttgtatgttatgcaacaatgttatctgcatccaaaacactaataacaaaaggaattcagtggggcctgtcagcacgggcctgtgtcccaactccttggaaagctaaagcagcagaatagcaagttcaaagcttgcctgggctaagactagattcatgggcaatctagaaatcttaagaagacactgtatcacaaattaaaatgtgagtttgaagaattggctccatggttaagacacttactgatcttgcataggaccagacatcaggtcccagcatttataaccatctgttactctggttctagaggacaaaacactttcttctggcttctgcaggcactgggcacatacaagggagacaaacatgtatgcaaacaaaacattaataacataaaatatatatctttaaggcactaaaatagagtcaagcagaatgctggtcttgaatgcctgagaccccaggttcactgtccattgccacaaaataattttcaaaattggtcatatttctgtttccagatgaaaatgtatgaaaaggatgacatgggtatatttaaattttccataggaaaatatgaagcttctgctttaggtatccacaaactctggtatttatcttcatttctatatttcaattgagttttgtggctgtagcatctcagaatgaaaattccatctagaatttatatttgaaaagtccatggcacaaagggtaaaagcttgcaaagcatactgcttttattctcccatcaggagatgagctgcttagtttccgtcaacttaacaaagcagagtcacctcagaagagggaccctcatttgaagaacaacctccatcagatttgcctgtggcaatgtctatgacacattttcttaattgctaatcccaggagggcccataccaatgtgggtccatgactgcaaggccaaggttagataagaaggcagtgtgagcaaggcatggagagcaagccaataagcaatgttcctccacagtctctgcttcagttcctgcgtagagcttgtgcccaggcttccctcaagtattgactataacctgtaagctgaaatagtgttttgtcatagcaacagaaacaaaactacaacagcagatgttattgaaactgattctacaataatcaattgcaggatagcatcaacaattttctaagagtttgcataaaacaagaaaaattaatgagatgaaatgaaatgaacactatattgtttgttttaacttctgtgtatgtatagtatgtgtgcacatatgtgtacatgtgggaccagagatcaatgtctactgccttcctccatcactcctcattttatatgttgaatcaaggtccttcactaaagccagcattctcactgctatctagactgtctgatcatgagttctggggagcctcctatctctatcttcattgccataagttataacacagagaaagatgtttgacattttctacacaggttctaaacatcagaaccaaggtccttcagctcgaacaactaactgacccatttactcaactcctaggaatatgttaattcatgtaaatgaatcaattcatattttcccaaggaaatcagtgaattattacagacataatatacatgatatataagacacttgaaataaagattccacttaatttttgacatactagtgtaaaagaggagtgattagcctggttagcaagtgaaaaaaaccaagacttataactagttcacatcatcctactgggtgatgtgacagctaagtagcaaagctggggtttgtcagactctgaattcaggacagaggttcaccttctacactgcctataaaaacatgaaccctgaggaggtaatcaaaaggtctctgaagttaactgctgttatgctttgaattattatacaagttgcaaagcccattggtgagcaaaagctttttgagacccacaacacaaggttaatagagagctgcttctctattggtttccactgcattgatgtgttgacttcagcacatttggtaaataccctcaagttcctgtgttagtatttgctaaatactgtgttcaacacagaagtcccactgagagtcctctggtacagtgttctcattgatcacttttcctaaaaaatacaataatgagatctcacaccattgataggcattagtaaagcaaagatggtgaaatttgataccatgtttctaagactataaactcagaatgaatcctttgggtccccctccctcattcattcattaacccattctgctggctcattccttcactaaacagaatttatcaagctcttcctacatgcctgacaaagtttctatgagaaaaaaagtctcatctatgtttacagagcattatagatcagagaagtcttgagttggaggagtcattaccaactctctccccacagaggttaagaaggttggctacatccttctagctccatctgttgcgctatcaggcatccctcaccacacaactactcttctctgtggccactgctgagattacaggagtaattggttctggctcagagcattggatttccttgttatgtgaccacctaccctttattaaatgttcctcatgaatctgagaacatgtgccagatattatttgccttaacctggtacatagagctggatctcctatcagtggcttctcaagagttcttgattccctatatgtctcgagaaccatgctattgtttagatagaaaatgtcctcctcaggccttgtgtatttggagatttcattctgtagcactatttgggagattatataacctttgggacatggatcaaacagaaagccaaaagtttgaaccttgagggttatatactaaccccacttctaacccaagcaacagctgcttccttatccaacaaaccagaagccacacaagaagctcatgctgccactgatggagtccatctgacaagtcttcctccttaacatgctagactgtagctctttaaaactgtgagccaacatcagcctttcctcctttaaactgctttctgtcaggtgtttttcataatgatgaagaaagtaactagtatgcttttacacgtgacttaggacacacacacatacacacacacacacacacacacacacacacacnnnnnnnnnnnnnnnnnnnnnnnnnnnnnnnnnnnnnnnnnnnnnnnnnnnnnnnnnnnnnnnnnnnnnnnnnnnnnnnnnnnnnnnnnnnnnnnnnnnnnnnnnnnnnnnnnnnnnnnnnnnnnnnnnnnnnnnnnnnnnnnnnnnnnnnnnnnnnnnnnnnnnnnnnnnnnnnnnnnnnnnnnnnnnnnnnnnnnnnnnnnnnnnnnnnnnnnnnnnnnnnnnnnnnnnnnnnnnnnnnnnnnnnnnnnnnnnnnnnnnnnnnnnnnnnnnnnnnnnnnnnnnnnnnnnnnnnnnnnnnnnnnnnnnnnnnnnnnnnnnnnnnnnnnnnnnnnnnnnnnnnnnnnnnnnnnnnnnnnnnnnnnnnnnnnnnnnnnnnnnnnnnnnnnnnnnnnnnnnnnnnnnnnnnnnnnnnnnnnnnnnnnnnnnnnnnnnnnnnnnnnnnnnnnnnnnnnnnnnnnnnnnnnnnnnnnnnnnnnnnnnnnnnnnnnnnnnnnnnnnnnnnnnnnnnnnnnnnnnnnnnnnnnnnnnnnnnnnnnnnnnnnnnnnnnnnnnnnnnnnnnnnnnnnnnnnnnnnnnnnnnnnnnnnnnnnnnnnnnnnnnnnnnnnnnnnnnnnnnnnnnnnnnnnnnnnnnnnnnnnnnnnnnnnnnnnnnnnnnnnnnnnnnnnnnnnnnnnnnnnnnnnnnnnnnnnnnnnnnnnnnnnnnnnnnnnnnnnnnnnnnnnnnnnnnnnnnnnnnnnnnnnnnnnnnnnnnnnnnnnnnnnnnnnnnnnnnnnnnnnnnnnnnnnnnnnnnnnnnnnnnnnnnnnnnnnnnnnnnnnnnnnnnnnnnnnnnnnnnnnnnnnnnnnnnnnnnnnnnnnnnnnnnnnnnnnnnnnnnnnnnnnnnnnnnnnnnnnnnnnnnnnnnnnnnnnnnnnnnnnnnnnnnnnnnnnnnnnnnnnnnnnnnnnnnnnnnnnnnnnnnnnnnnnnnnnnnnnnnnnnnnnnnnnnnnnnnnnnnnnnnnnnnnnnnnnnnnnnnnnnnnnnnnnnnnnnnnnnnnnnnnnnnnnnnnnnnnnnnnnnnnnnnnnnnnnnnnnnnnnnnnnnnnnnnnnnnnnnnnnnnnnnnnnnnnnnnnnnnnnnnnnnnnnnnnnnnnnnnnnnnnnnnnnnnnnnnnnnnnnnnnnnnnnnnnnnnnnnnnnnnnnnnnnnnnnnnnnnnnnnnnnnnnnnnnnnnnnnnnnnnnnnnnnnnnnnnnnnnnnnnnnnnnnnnnnnnnnnnnnnnnnnnnnnnnnnnnnnnnnnnnnnnnnnnnnnnnnnnnnnnnnnnnnnnnnnnnnnnnnnnnnnnnnnnnnnnnnnnnnnnnnnnnnnnnnnnnnnnnnnnnnnnnnnnnnnnnnnnnnnnnnnnnnnnnnnnnnnnnnnnnnnnnnnnnnnnnnnnnnnnnnnnnnnnnnnnnnnnnnnnnnnnnnnnnnnnnnnnnnnnnnnnnnnnnnnnnnnnnnnnnnnnnnnnnnnnnnnnnnnnnnnnnnnnnnnnnnnnnnnnnnnnnnnnnnnnnnnnnnnnnnnnnnnnnnnnnnnnnnnnnnnnnnnnnnnnnnnnnnnnnnnnnnnnnnnnnnnnnnnnnnnnnnnnnnnnnnnnnnnnnnnnnnnnnnnnnnnnnnnnnnnnnnnnnnnnnnnnnnnnnnnnnnnnnnnnnnnnnnnnnnnnnnnnnnnnnnnnnnnnnnnnnnnnnnnnnnnnnnnnnnnnnnnnnnnnnnnnnnnnnnnnnnnnnnnnnnnnnnnnnnnnnnnnnnnnnnnnnnnnnnnnnnnnnnnnnnnnnnnnnnnnnnnnnnnnnnnnnnnnnnnnnnnnnnnnnnnnnnnnnnnnnnnnnnnnnnnnnnnnnnnnnnnnnnnnnnnnnnnnnnnnnnnnnnnnnnnnnnnnnnnnnnnnnnnnnnnnnnnnnnnnnnnnnnnnnnnnnnnnnnnnnnnnnnnnnnnnnnnnnnnnnnnnnnnnnnnnnnnnnnnnnnnnnnnnnnnnnnnnnnnnnnnnnnnnnnnnnnnnnnnnnnnnnnnnnnnnnnnnnnnnnnnnnnnnnnnnnnnnnnnnnnnnnnnnnnnnnnnnnnnnnnnnnnnnnnnnnnnnnnnnnnnnnnnnnnnnnnnnnnnnnnnnnnnnnnnnnnnnnnnnnnnnnnnnnnnnnnnnnnnnnnnnnnnnnnnnnnnnnnnnnnnnnnnnnnnnnnnnnnnnnnnnnnnnnnnnnnnnnnnnnnnnnnnnnnnnnnnnnnnnnnnnnnnnnnnnnnnnnnnnnnnnnnnnnnnnnnnnnnnnnnnnnnnnnnnnnnnnnnnnnnnnnnnnnnnnnnnnnnnnnnnnnnnnnnnnnnnnnnnnnnnnnnnnnnnnnnnnnnnnnnnnnnnnnnnnnnnnnnnnnnnnnnnnnnnnnnnnnnnnnnnnnnnnnnnnnnnnnnnnnnnnnnnnnnnnnnnnnnnnnnnnnnnnnnnnnnnnnnnnnnnnnnnnnnnnnnnnnnnnnnnnnnnnnnnnnnnnnnnnnnnnnnnnnnnnnnnnnnnnnnnnnnnnnnnnnnnnnnnnnnnnnnnnnnnnnnnnnnnnnnnnnnnnnnnnnnnnnnnnnnnnnnnnnnnnnnnnnnnnnnnnnnnnnnnnnnnnnnnnnnnnnnnnnnnnnnnnnnnnnnnnnnnnnnnnnnnnnnnnnnnnnnnnnnnnnnnnnnnnnnnnnnnnnnnnnnnnnnnnnnnnnnnnnnnnnnngagagagagagagagagagagagagagagcaaaacaacctttatgcaccataattaattggattctagattttctgagcagctacaagagacactagggaatatctgaataaaccataaatactaattggatggtactcatgaatctgagaacatgtgccagatattatttgccttaacctggtacatagagctggatctcctatcagtggcttctcaagagttcttgattccctatatgtctcgagaaccatgctattgtttagatagaaaatgtcctcctcaggccttgtgtatttggagatttcattctgtagcactatttgggagattatataacctttgggacatggatcaaacagaaagccaaaagtttgaaccttgagggttatatactaaccccacttctaacccaagcaacagctgcttccttatccaacaaaccagaagccacacaagaagctcatgctgccactgatggagtccatctgacaagtcttcctccttaacatgctagactgtagctctttaaaactgtgagccaacatcagcctttcctcctttaaactgctttctgtcaggtgtttttcataatgatgaagaaagtaactagtatgcttttacacgtgacttaggacacacacacatacacacacacacacacacacacacacacacacacacacacacacaccaaggaaatacaggagggagggagttatatactcataggaaacacagccacacagacactaagcaatagaaaacacaggatttatgctccaacaggaaaaacaagagttacatgtcaacaggagacatggaaattatgtaccaatagaatgatatcttgatatactggctccttcgaagagatcttctctaaaagatgatcttatagagaatctccctccctcctccctcctctctctctctctctctctctctctctctctctctctctctctctctctctttctctctttttctatcgctatccctctctgaaaagctttgatttagttggggtattgtcataaagctgccaaatgtgtcaagtgtttatctggtgctcagcatcattgtattattccatcttaggtcagatgtcagtcacaacagctgtaatgtcaccacagaaaaatgactactaataagtgtccatgaaataatgaactttgaaaatgcaagactttttaaccaacataagatttgagttaagcaagacttatcaatgaatactgaaatcagtgacaaaaaaaaaaaaacatggctaaggaaaaaaagtttcaaaaattctgatgaattatacaacgagtcctttaaaatttataaaggaaaaattatgcctttgcatatgagacttctgaaagataccagcttaactgggagatcaaacacataacaaataacagagccatctgaggccccgtgtctctgaaaaggattagccatgagatatgcatcatcctctgtcagtctgtcttgtcaaaaatgtttttctagtgtctggttatagtctatgcctgacttccaggagggataaaaagtaggggataaggttaatcaacatacaaaaaaaaaaagcagttaggtgacatgggcagtgtacagggcatggtcagagctcttcaaaagccagaggcataaaagtaacatgaaaaaagtagtctacttttcacccacagctaaacactaaactgaactcctggaacccagttgcagagagggaggagtgatgagcaatggggttaagactggactggtgaaacccacagaaacagctgacttgagcaagggggagctcaggaaccccagactgatggctgagaggtcagaatgggactgatccagatccactgaacgtgggtgtcagtgaggaggccttgacaatctatggggcctcggtttgtagaccagtatttatcctttgaacacaaatggacttttggagcccattccatatggaaggatgctctctcattttggacacatcggggagggcctaggccctacctgggatgatatgacagactttggagatcccccttgaagggcctcatcctccctgggttcaaaggggggatgggtgagggcttgggagggattggtggagggcaagggaggagaggagggagagggaactgggactgacatgtgaaacaagcttgttactaataaaaaatcattaaaaaagaaaaactagtctacttttaaagggagcaaaaaagaaagcaaaagaatatatacatgtacatattatacatacacacacatgtatgtgaatgcacacacacaaacacacacacacacacacagagagagagagagagagagagagagagagagagagagagcaaaacaacctttatgcaccataattaattggattctagattttctgagcagctacaagagacactagggaatatctgaataaaccataaatactaattggatggtactatannnnnnnnnnnnnnnnnnnnnnnnnnnnnnnnnnnnnnnnnnnnnnnnnnnnnnnnnnnnnnnnnnnnnnnnnnnnnnaggagctatggtatgtgcatttcagtttgatgtgcagagtctgaactcttatttcaaggggtcctgtgttttgtaactgtgtgtaactaaaaggaaagaggccataactttgcaaaagtgaataatttatcttcaaatcttgatgttgttagtgaatatttattattctgttgtgtccatattttataggtttgaactttttcttttaaaatattggagaaaactgaagatccaagtgatatttatcataaaaatgtatcaagtagtggtgatcacagcacattgtctaagagcaattccatgaatgtattttgtggaccatcaatcaagagttgtgccaggataaagaaagaattccatggcctgatatgtttgtggagcaagtacaataacttctcctagtggtgatgtacattttcatattgatgatgatagaacgtactgaacaaactcctttttggtattgtgatctaacttcaaaaaacgatgctgaatatgatctggtctgaaagcaaccagccacagctggatagtacagtgcttaggattcataaaacatgatacataaatggacaactctcagctgtgagcagaaatcaaaggaacaaacttggtaagacacatgaagtggtttaggttttctttgcatccctggtatcttaattaaacaatcaacggttaatcctaaagaaaggcacatttgttgacagtcagatttcaagcacagtaaagtcgggaaacttcaatgagaatgtctaatatttcatgttttttactctaccctatggggttttactgactagaatgacagctagcctgtgctacacaccatgacaatatttaaagtggcttgccaaaagttcatcacccaaatgtgccccaagatatacaattgaaatcagattttataagactgtcactgaacaggatgtagtgtgtttgatgccatttcccactttatattttttaataatggggcatataaaaggttatctgcaaacaaaactatgacatgttcattcattattgctttcaacagctcagctcagctagcctaacacttcttgatatgaggcaaatctacctgacttgcttcctcaagcctggacagactgtgggtgcagacatgagaaagggaagagtctcagtaaggatttcacatattcttccattgcttcctgtatttgaaggagtgcctgccacaaactgaggctctaaaaagttcaggccaggacttgctgtgacaatgcttccctcacaaacggtgagggcagaaggtcatctccaggggtcacattcacagatgtaactgcatcactacaagtttgcataacctaatgaggccactttagagaacagtaggaactcaacagacaatttttttcatttttaaatgctaaataagcctctgtgatgtgtcaaatactactccagatctgaggaatacagatgtaaatgaaacaaatatgaaaacttgtgtaacttacatgctttgggaaaaaataccaatacaaaagtcattggtttttagatagcattaagtgcatagggtaaaaactccaaggagctgagccatgtgctggtagggaactacttttgtcaggggaatctttctgtagcatgacatagagagttgaaaagatcagtctcttcaaaggccatcttcctaattgatgagcacagggacacaagagatgggcagcaacaagaaaacatctaacaggccagttaaatggcaccatgggtagaggtgcttgctgtcaagcctgatgacctgggtttgatcctcaggacccacacaatgggagaagggaactgattttcacatgttgttctctgccacagatgtacactcatatacaaacacacacacacacacacacacagagagagagagagagagagannnnnnnnnnnnnnnnnnnnnnnnnnnnnnnnnnnnnnnnnnnnnnnnnnnnnnnnnnnnnnnnnnnnnnnnnnnnnnnnnnnnnnnnnnnnnnnnnnnnnnnnnnnnnnnnnnnnnnnnnnnnnnnnnnnnnnnnnnnnnnnnnnnnnnnnnnnnnnnnnnnnnnnnnnnnnnnnnnnnnnnnnnnnnnnnnnnnnnnnnnnnnnnnnnatttaaggaagaggacaacttacaaaaggttcccaccgcaacacaactttaatcaagaaaatctctataacactgtgtttatgattcagtattttattgccaagttttctgacatgtaagtaaattgtagggcaaacaattttggcttccccattctctcctcaagaaaattattctcttttgggagagtatatacaataaaggcaaatctgacctgattcctgggtccgcgtgaggatacctacagaagacagatccaaaaagcaataataaaggctatctggggctcaccaagtaatttttacctgacgattaacttttctaaaatgtagtaactctgaactttacacaaactcttctagaattattcttgttatgggataaaaatggctgtttttcctcaaagttcttgtgctggaagtgctgtcactgtggccatttggggaatatcttaaaaagtggggccgagagggatatcaccaggccatggggccaagcccttgtgaatgggtcggtgacagctggcaggattgccagtttgatggactaggttattactgtagctgttggtaattaaaagaggatacctggccccttcccagttactagcttcctttctaaccatgtgatctcttttgcacaagttccccatgctgtggtacctgggctggggatatagttcagtggtagagttcttacccaacatgttcaaggccctgagttcaatgtccactgctacaaaatataattctttaaaatatatcaatatttaggatatgcccttttttaaaaaaggctaaaactaaccctgaagtcggctttagtatacaaccttcattctaataacactctttaactaatacatgattgttgatcccctgtaagcccctctcccattgctctctagtctctaggatgttaaaaactgtttgcctggacccttgggcattttttcctaaagtagaccaagtattattctgcactgaaattttatttgcttacctagaacagtaggaccttctgggttctacaacccttgtcctcaacatactgttagtaaactggagagcatcaagatagtccacatatcatccaggcttgctctctgattatggacactgtggatataatgtgaccattgtccctggttctcagggaactccaggccaataacatcacctcctaaaattaatccttccatccattcagtatgggggagggagaataaactcatataataatcagacaagattactttactgagaggtataattcaaaggaaatgtgaaaagaaatgattaactgatattgttctagattgactgtaggagaaggaaaaatctgagttgatgatgttcagctgagtcttggtgcccagcagtcagcccatccacctgacattatctatgattatttaaaagagcacaaatggagggatagaaatgcacacatatctgctactggaaatgacaaaatacatataaataataaatgctggataaatttttcaatatgaatgaagtcacagtaaagtaaaatattgaagaaaatggaagacaaagttcttagtgtctcccttttaaactatggtaacaacaccaacaaggtgtcatcaatatagatattcagaaaagggagaagttgttttaaaaatcattcttaattttaaaactaaaaatagacacagagaacacttctaggatgatgcttgatagatatggaagggagagaaaaaagagtggaagtaacaaattgtctaagaacaaattttataaatgattgaaaaagatactcgaacatttctgttttaacagtaactttatttcctccttgtgttttatgaatctgtgcttaactgtttatgtatttaaatcctaactatcatcctgtgtatactattttaggcaattactgcaaaaataatgaaaaatctttattgaccatgatgggaagagcttgataaaacagaactactatcattatatagtttctgagtttttgtgattaaagccttctacactgaatggagaagagaaaaatggagaggagagatgtgactcaggtcatttggcaagttttattgcccagggcatctctagtagtgagttgtgataaagttagtgtttacaagaaaacttttctgtcctctgccttctaggaacgtggtagttcagacgtcctctattctttacagtcttgtcatctactctggctgttgactctgggggtgggtggcataatcacttctgagaacaacttatttggttgtcagtactacttacttccctctatgggtagttgtatcattcctgtaatggcatccctgacatactggatcttataatatggagagctggctgtaggtttctgatgagtttgtttgtgcaagtggaaaatgaactttcttcttcaagtcattaaaagtgtgtctttatttattgctgtagtattcatagaccattctaaaagagaagttgataacaagaagtggaggattgccacaaaaagcataaaatacacagctttatcttggaggtaggcagcatgttttaagatagagggaaagttagcaccccacataaagaaatgggcaagcacttggtacaactctcacctacagttactggtgtgtgctggagctggcatacatccaagagcactaacagaatctctgctcaactctgagttttattgtgtcagggtggtaacttggatctgccatagaaggataaattaaaccaatgaaattgggaagcactataaatcatgacatttggggttttttcaagagctagctattaaacatcaccacaacactgacaacaataatttaaaggcaggtcccacagtgaagaaatgtgtatttttgggaatggtcaacatctgattggaatattaaccatagtggatgtttattgcagttttcagtgtattaaaaattaaggatagaatgagaataaaacaggtccatatagaagccagaatatcaggcatgagaaagttcatattcagggatgggtagaattagagaaggatatccttctaacctgggaaggataaaaccaagattcattctaagagacaaaggcaaagaaaacctagtttcatgcaagtggtaaatagagggtaggtcctggaagtttttgttacagttttccaaacaacttaagaggaaatacagcaaatccttatgactaaatatttagatttgttcaaaagtattccataagaaaccaagaaaaaaacaaaagcatgtttttcccctcaaagtcaagattgtgtgcccatgcatgcgagaatatatattcatatgtgtctgttgccaaatgaatgtgactctaataaacaagtaaaaaaaaacagtaaagtttaaaaaagaaaacattcctgcacttgaggtgtgtgtcaccaaactcagctgtgctaatacattctttctaccactcagtaggtaggcatggtttctactagtagtgacattctacggtatcactaacattgattgttctttccagtttagagatttagactgccatgagcgtgtacctgtgtttgtgtgtgaattgtgatgtgtgtgcatgcacatgggtcatgtgtgagatgtataccttgcatatgctaaaggacatcaaattcttctattgttctctacatagacagtgtctctcactgaagctgaagcttgccttcctcccacctgcctttaccaggatgtcagtaagaaaacccctcacccactgctatgatgtttctgatttttgtcatcttccaggtccccacagtactgaggttataaacacaggaaaccatacttgtcttttttgtgtcatactggggacctgactccaggtcttcacccatgcacagcaaaaactcttacacactgagcatgtcctcagcccccaggattgcctttatacctgctatgttaggaagctagaagatgaaaattttagatgtattctaataggaattgctgttattaaagtgtggaattcaaaggcaaatgggttgaactagaagaaaccattctgagcaaagtaacccagtcacaaaaaaaagacaaacatggtatgtactcactcatatatggattttagacataagagcaaagaattaccagcctacaatccacaccaccaaagaagctaggaaacaaggagtctaaaagagagatagatggtcccccgaagaaggagaaaaagacaagatctactgagcaaactgggagcatggaggggggtgaggaagctaggaggaagagaaggggagaaaaggaggggtgagaaggacatgaggaagcagtaaagttgagttgggggaagaatagcaagataagagataacataatagagggaaacattatagatttaaagagaaatcaggtaccagggaaatatctggagatctacaaaggtgtcaccaactaacaatctaagcaacagaggagaagctaccttaaatgccctcacctgataatgagattgatgactaacttatatgccttcatccagcagctggtggatgtagaagcagacacccacagctaaacactgaactgaactggaatccagttgcagagaaggaggagtgatgagtaaaggggtccagaccaggctggtgaaacccacaaaacaatgggaagctcttggtcctcagactgataccggagaaatcagcatgggactgttccagaccccatgaacatgggtgtcagtgaggagacctcagaagtctatggggcctcttacagtagataagtacttatccttagcatagcccattccacatagagggatacttgctcagcctagacacagggggtgggcccaggccctatcccaaaggatatgacagactctggagactccctatggaagacctcaccctccttggggagcagaaagggtatggaataggtagggtattatttggagggacagggaaggaggaaaggaggggaggaagagggaactaggattggcatgtaaaataatcttgtttctaattcaaattttaaaaatgagtaaaaaataaagtgtggaattcaagaagaccaacaagatagggaagtttaattaaactaccaataactaataataaaagaagactgcttaggtcactgggaaacttcttaattctcaagaataaaatacttgatatatgatccttgtaacattctgttggggactttgggagcttttcctcccttctgatgggagggtaaggcactttaagttgtttgtaacctagatccccttcatttcaaaggcccagtcttgacatacctatccaaaaatgatatgtgcccagaggatatgaacaagtatactaaccgaagaccagaaaacacacacatccataagctcagaagaggatttccgtttgctttcacttatttcaatcaccttacatttatgaaaactagaattcatgcagagtagctgactgcacctgaagctttttacaattctctccccctcattttacagggaagaaaagtatccatgtcatccatggatatgactaagtatccatggatgacatggctatgagaaagaggaacagtgagctgttctccctgacaagataaaattagatttccaaatgaccctgttagcaaaggaagcaaataagagtaaagaccttaagctgtttcaaagtgcattttgaagtgagaaacggtgtgtgaaagttcaagatcagaaccaaagagacatacaggtatcactgacctccagctactcaggtgtcaacaacagttctgtggctggggagaaagcaaataaagagtgtccccatgatacacgagcaagagacagttgcatgaagaattcatgcagtgtttctggaatgtgtgactgaattaattcaaggaaaatatgtggaatttagagaggccttaacttgggcaactctgttttttgagagcaaacaacaagcattttaaaccagagtactttggccttggttacaacaagttagtattctcagatggcagcttcatgtattcccgggagaggtaagttggcctacactgtgtgaaggtgctataacctacaaatattagctatctggttgctacatttcagaaattctaaccaatagaatgttatgcatagtatcacaaaagaatacagataaatctaacggagttcagtgaatattctagatactaatgtaaaagaagccaattagtctatgaataaatatcactaatgaatgagtgtttactttctcatggtgataatgatggtgatgatagtgatatcatctgtgatggtaatacatgatagtgatgaagtaatggtgactatagtgatgatggtatataatagtgatgatgatatataacagtgatctgatgactatggtgatgatgacatagaatcgtgatgatgtaatgatggtggtgaaataatgttatgctgatatgatgatacaatgctaatgataccattgtgagggagatggtagcaatattggctgtggtggtgtttactatttagtggccataactaaggtccacacatcatgctaaagatcctaaaagcataataatatttatcctgcattttattggggaaattggaagctacagtagttagagtacttgtcatgttgggaagacagataattgaccatgtgaagactgactttaattatgttgaaacccatgttcagacaacacattttcagaaatgctccaaggtcacatgctggcaaagaccaggttccaaacacaagtctgcctggctctggaacttgagcacacactcacctcacacagttctcctactgacattccaaccatttgccaggttttctcaagcttctgctatacagaatttctgtaggaatatggcagccttctaataaatattccttgactaaaataactactttttacaatagcaagcttcattatgaacaaattataatgtgaaagctacaggaatgaagtaccatggaaagcaaatattttttaattttatttttatttaaattatttaattaatattcatatttacatatcttccccccattccctcgccctcccatccttccaggttccccaccaatcccccaaatccattccccaactcctccatagggatagtgaggccctccaccagggaccttcaaagtctgtcatatcatttggggaagagcctaggtcctccttgctatatctgggctgcaatagtatccctccataggaaatgggctcccaaagtccatttgtgctctagggttaaagactagttccactgttagaggtcttatagactgtcaggagccagctctggtcagatataaaaagtccttctcagcaatgtagcaaaccaacagatacaaaaatttggaataactccctgtatcatataagaccaccatgctttaaagttagaattcaacaacaacacaaattgcagaaaccctacaaattcatggaaattgaacaacacacaattgcaccattctgggtcaaggaagaaataaaaaaagaaattaaagacttcctagaatttaataaagaatgaagacacaacatacccaaacttatgggacactttgaaaacagtgctaagaggaacgttcatagcactaagtgcccacatgaagaaactagagaatagtcacactagagaattaacagtgtaactgaaagctctagaacaaaaggaagtgaactctccatggaggagtagacaccaggaaataatcaaactgagagctaaaattaataaagtagaaactaggaagacactacaaagactcaatgaaacaaagagttagttcttcagaaagtcaagaagatagacaagcctttatccaaacttaccaaaaggcagagagagagcatgctaattaacaaatcagaaatgaaatggggggggacataacaatgcatactgaggaaatccagagaatcctcaggtcatactttgaaaacctgtacttcacaaaatttaaaaatctaaaggaaatggacaattttctggatcaatatcacttaccaaaattaaatcatgaacagataagcaacttaaacagacctataacccctaatgaaatggaagcagtcatcaaaagtctaccaaccaaaacaaaacaaaaagcccggggccagatggtttcagtgcagaattctaccagaaattcaaagaagagctaataccagtactcctcaaattgttccaaaaaatagcagcagagtggacattgccaagctcttatatgaggctacaattaccttggtacccaagccacacaaagacacaatgaaaaagagaattacagacaaatatacctcatgaacatcaatgcaaaaatattcaacaaaatactggcaaatcaggaacaagacaaggctgtccactctctctatatctcttcaatatcgtccttaaagttctagctagagcaataagacaacaaaaggagatcaggggatacaaattggaaaggaagaagtcaaactttcactatttaaagatgatatgatagtgacccgaaaaactctaccacttaattactatcactgataaacaccttcaccaaagtagcaggaaacaagattaaccaaaaaagtcagtagcactactatataaagatgataaatgcgctgagaaaaaaagtcagagaaatatcactctttacaatagtaactaacaacataaaatatcttgaggtaacactaaccaaaaatgagaaagacctttaaagaaagaaattaaagaatataccagaaaatggaaagatcttccatgctcttggataggtaggatcaacatagtaaaaatggcatccttgccaaaagcaatctacagattcccatcaaaatcctagaacaattcttcacacaccttgaaagaacagtactcaacttcatatggaaaaacaaaaaacccagaatagccaaaacaatcctgtacagtaaaggaatttccagaggcatcaccatccctgatttcaagttctattatagagccatagtcctgaaaacaccttggtattggcacaaaaatagacaggttgaccaatggaatcgaactgaaaatcctgatattaacccacacacctatgaacactgatttttgacaaagaaggtaacgttatacaatggaaaaaagaaaatatcttcaacaaatgttgttggaataactggattcagacatatagaagattgcagatagatcatatctatcaccctgcacaaagcttaaatcccaatgaatcaaagacctcaacataaattcagccacactgaacctactagaaaagaaggtaggtggtatcctctaacaaactggtacaggagactgctttctgaacataacagcagtaccacaaacattgagatcaacaatcaacaaatgggacctcctgaaactgagaagcttctgtaaggcaaaggacacagtcagcaagacaaaacgccagcccagagaatgcgaaaagatattcaccaaccccacatctgacagagggctgatcaccaaaatatacaatgaactcaagaagctagccaccaaaacaccaaacaatgcaattaaaaagtggagtgaggaactaaatagaaaattctcaacagaggaatctaaagtggctgaaggacacttaagaaagtgctcaccatccttagtcatcagggaaatgcagctcaaaaccactctgagataccatcttactcctatcagaatggctaaaatcaataacaccaatgtcaatctatactggagaggatgtggagaaagaggaacactcctccattgctggtgggagtgcaaacttgtacaaccactttggaaatcagtatggtggtttctcagaaaaatgggaatcagtctacctcaaaatccagcaattcctctcttgggcctatacccaaaggacgcattttcatacaataaggacatatgttcaactacattcttagaagcattatttgtaatagccagaaactggatgcaacctagatgcccctcaactgaagaatggatagagaaaatgtggtacatttacacaaaggagtactactcagcagaaaaaaacaatggaatcttgaaattcacaggcaaatggatggaactagaagaaaccatcctgagtgaggtaacccagtcacaaaaagaaaagaaaatctaatagaattgtcacctttcccacattatcccttagaaaaggcaatgtaacaaattcatttgcagttatctatgtaggattgaattaatttgccctaaatgtggtcactgagtcactgccaaatcattaccatttagtttttgttatgcatggtccaaagccctatcctgcaaaagtggatggaagccattgacagccaaatcagaaaccttcaccagaaaactgccatcaacagtgagcatgattcactgttcacctgggttctaaccaaggcctacaaaacaaggaacttaagtgcttctcagcatctaggcctgacttgaagaatctccacaatctaatcatatttaaacaccaggaaaacatgcctttcaggaagaaagacactgcagagctctcaaggagtcccgaaggaagattaagtgggctgtgatatccacaaatataattaacaacctaatagtgtatgcattcagtactgattgctgcataatcacttgactaatagaaagaaactaatttgccattatagctgttgtgagattacatttaaaggcaaaatcacagcacagtgggactgcaaccctagatgttagcttaaaaagaaccaatctttccctctcatttctccattaatagttgctaagaacagtaactaaacatggcattagcattgaagtcttacagaagcacagaccacatgaatatattggcctgttatcactatcctgcttcaataagagggactagaggcagttaggaggtaatgtaatcaatctttacaaggacataaattctgaaaatcctgatcaaaagtggtctaaagaattaggaatgcttacaaaatccttttacttatggcaagaacagcagacctgttcagagctgtgtgtgtgtgtgtgtgtgtgtgtgtgtgtgtgtgtgtgtgtgtgtgtgtgtttgcatacccatttttacatatgtggacatgtatgtgaatgttcatatgtgtgcaagtacatgtgtgtgagtgtaaagatgtatgccggtacctacatgtgcctgcagaagccaacatcttacccaacctcaagtgtgaacctctcaagtgtcatctgcgcttatccaagacagagactctcaatggcctgaaagtcaccaaagaggctaaactggctatccacatgaatatgtggctctgcctccccagaaacaggcttatcagcatatatagtcatgccccactctttatgtaggcgctagagtttggactcaggtcctcatgcttgagggcaagcactttacccacctacccatatcccagcccagtgtcttcatgtttttttttttttaagtaaaacatcaagtcacatctttgccatattaagggttatgacaagtaggatgaatctagtagtataccctcataatttcatggagattcacatagatttacatggtaagtaattaggcttatctgtatgtatatggtttatatatacatgtataaataaaggtaactcaaactgagcactacggacattttaagttaaataattgcagcttgtaaggagactgtcctatacattataggacccctaattatactaactactagaagtctgtagtacacatgttgctgccccataatgtatgacaactagtggtaaactagtctacagttaaaattaaatgatttaaagtagcattagcagtacatagagctaggagggacataccacagccatgtagcattgggagacaaatttctaaatgattttaaatatctgcatagtagccactaataggtttaaattccacataaggaaatatccttattgctactattagaaccttgaattaggacagcttatttatagtctgaagttaacaagtaaaagtgaagaaaaaaacatccaaaagcacactatccagcagataagggacagcccaagacatagggaacagaagtctgagtttacctagtaagataaaatagaaaacaagctgagctgactcagccaaatctgtcccctgacctcagtactcaagtattaattgatggctgacatcaatactttctattttttaaccctacacaaaaaatattccagtaccaccatttcattcctaaaataataaataaataaataaataaataaataaataaatctattcccttagatacaaatcccaaatccatatggctgaatcttgctttttaacccagtttatggtgaatttttatgacttttaactacttctcatctaaattcctgtttttatcttttaaaaagaaatttgataatgacatgagaatctagccatatcattaataatgatcacatgtagttgttttaaaatcatcaaataatatctataatgtatcctggtaataaatgtcaaaatacactttggtgtgaaaggatcaagttccactctgtgttgagcttttgaaaaagttcctaaagtgttatcaagccatagagttatgttaacactacaatccagtgtcttacaatcaaccaacaaagatatgtgcctgggcagttcagcaagtgctgtcacacactttacattgtgctcctgcagggtgaatggaaccagcactctgcctgtatttctccctagtcacaacagcacaaagccaactctctttaaagtagttctcaactgggaaagcccatgctttttcatacacatttcactctcatatgtgctcagtactccacttttgaagccaatgtgaataatcctgcctctcaatattggaatctaaagaaacaaattctgttacaggggcaataatgtgaaggattgtgtctttctaggaggattactgagaatatgattgctgaaggaaggagataggggtggagagacaactcagttgataaggttctaatgagcaaggatgaggacctaagctccatccccagagtcacgacacagtcctgtcgtcagagcactgggaaatggacacaggcagctccctggctccctggggtttcacaggcagctattccagttgaatcagtaagttctaagccaaggagaaatcttgtctcagaaaaacaatgtaggcagcatcctgaagagtaacagctaaggatgacttatgattttcacacacacacacacacacacacacacacacacacacacaagggggaggaacagcaagctcttgatgagagtcaagtcaaaggagaagttaggcctagacaggacaggcggatacacactcactgcaactcacagcttaaaatttcatgtaaagaagagtactttctctgcactaagtacatttaacactaccattgtagaccaaagactgcaagcaaaactactcccaaggtcactggagttagcaatcactctagctaaacagtcataatgtttaacatttgtcttgacagccatctactgccatttctgcctctgtaatttttctactatcttttatcttcttcaagagtagcttttacgaagggcccattatgtacaaggtgctcgtgtagagacacaaaaatgcataagtcttgagcattgaccttgaaacatccacagcccctaaacagataacagcagtttgaagtgagaagtatctaacagaatggaactaaagtgtaaagaaaggagctaagctccaccaggggaatccatcagatatcatagaagagagaggagcatggaagcatcagtaagcacttacacatcccagagtgtagaggcaatccagacagagcctcatggtgaggggtgtgtctggagcattgatcatggtctattccagagctggcacaggaaaatggtaccctgtgaggcaagaagtgtagcatgggaaaattgctggagccttaaacacctccaagttcccattcatattgcctgtcatcttgtggagccagtggtgacatatagctgtgaccatttagctgttctttttagttacctcagccaagacttcatcacatctaaagtggccaggtccagagaaaccctgttcttttgactcagagtttcagggcattatcctatgctattagaaaagtgagtggatttttacaatctttcttcttttgagactatgtcttctaaactacaggatggcctcaaattcactatcagctgaggataaccatgaacttctgattcttctgcctctacctcccttgttgtggggatcaaattcagggtttcatgcatattagaccaccattaggccaatggaactgtacctcccagccactggtatagttttcattttaaaataggatttatatttatcccaaggggtaaattgtggtgggaactgttatgtggaaatgaatctgccattcttaggttactcttagctgttagtccccattccctctacttgtccttatttttgaactggaataactgagatctatctgtgcattcacatgccactagaggccacatcagtgttcacaggagttcaaagcacttctatcttcctctattatgaattcacatgacttgttcatctgttgaatacattccttatcctgcgatccaaacaaaaacaaactcagcttgagactttgtatggttactgaggcattgcacattatctctacatgtttccccatgtaagaaagcaattacaggagctggtaagtctcagctgccaagcctgaggatctaagttcaattccaaggacctgcatggtggaaggaggaaatgaactaccaaaagttgtattctgacttccatgtgcacgccatggccttcaaacattcacacatagacatacccacacaacccaaacaaaatataataattttttctaaataaaagaagcaatcataatgaaagccattttggtgtttttgtagaataatcttgaatccattttaatttgtaaaggaaaagaacagtggcaaattttcctgttgtaccaatatcacttcatatataggatgctggtcctgcagtgtgagacccaccagctcaggtttcaactgagaaatattaacagacatttccaaataatacactcaatgttggtagtgcacacatagtccttagagtatatagaagcccctcctaggcattgggaatactccgagataactagcagaatactggaagcacaggctgagccacatcctatacctggcagaacaaactcggtcacctttccactttaagcactaaccacgcattctatggggccaccttttccaggttgcagcattgcagggaaacacatatgtacctcggaagattcatttctagtgcagatcttcacagcctcagggtatggtactttgttgttaggttgataacctccacctttttacttaaaagaagaacacgatgccaggcttgctgttctcatgctttggaaccattgttaagaaacacaaggtttatttaacagaaacacaacagtacagtgacagtcaatctaataaccaaagtgcccgctgaatgaccagcataaaggtagcatccatacagcatatactttggacagaacaaaaagtacttgccatgtaagcataaggacataagaccttcaactttgcatgtaatatgctaagatggaacttccagtatgtatttgaaatcttagttcatgtggtatataaaatgtgttaccaggcaatacacagttactacagcctcctaagaaccagagagggcaacagaaaccaagtaaggcaacaaagacaggatgccaacccagactactatacctactctaaggctatatttgtagatagatgttgtttaaattgacttttgttttcattttttttaattatggaatgctttgttttctccatctgttgtgattgaaagtgttgctgctaaagtagtatgggctggcatttatagtctcatggagtcctttttataaacttgggtgtccttgtgtttgggacatagatgtttagaattgcaatgtcctcctggtggatttttcctttgatgagtatgtagtgttcttctctatatcttccaatttgtttttgtttgaaatccattttgtcagatattaaaatggtacaccagattgctccttagatccaagcaaatggagcatgctctagaaggaaaattccaatgctatcactgcttaaatcacatgttgagtttcacatgctgatagtggagatgtcaataccccattttcaccagtacacaggtcatccagacaaaaactaaacagtgaagtgatatagttaactgaagttataaatcaaacagacctaacagatatttacatttcacctaaacaaaaaaggatatataactttttctcagcacttcatggaattttctctaaaattgaccacatactaagacacaaagcaagtgtctctgtctctgtctctgtctctccctctctctctctctctttctctctctctctttcaagacagagtttctctgtggctttggagcatgtcctgttcctcgatctatacaccaagctggctcaaactcacatagatacacctgtttctgcctcccaagtgccaggattaaaggcatgcactaccactgccacaccagcaagtctcaacaaatacaagaaaattgaaataacacctaaactctatctaactaccatgtattaaagccagatatcaacaacaacagaaggcttacaaattcatagaaatggaacaactcaccaatgaatgaaaaaatgggtcaagaaagaaattaaagattttcaagaactgaatgaaaatgaatatgcaatataccaaagtttatgggacacaatgaaggcagttccatgacacaattccatagcattaagtgcctacataaaaaatggagatatctcatacaagtaatgtcatatcacacttaaaagctctagaacaaaaagaagaaatcacacccaaaaggagtagacagcaagaaattatcatactaggtactgaaatcagtataataaaaataaacaacataagaaaaaataaagaatcaatgaaacaaaacaggtggttctttgagaaaataagtaagattgacaaactcttagacaaactagctaaagggtgaaggaagaatgtccaaactgacaatatgagagaatgaagagagggacatagcaatggacaccaaggaaattcagagaatcatagggcataatttaaaaacctatactccttcccccatcaacaactgaggcaggtggagagatggccctgaggttagaagatcaggggagctgtctctgtccttgtccagcaaaaacactctttagagcaggccctgcacctcatgtgtgtagcacaatagagccaactgcattggtggaggtgtgtgtaagccagctccaaagttgtgagaatgggagagttgtccctcttacccacctgacatgtggcagcatgggcaagggagagatgccctcctgccaaaatgcctgaagcaggtaggagaattgaccctgagggttagaagagtgagagagctacccctgtctgccaccagctgcagcactccggagagcaagccctgcacctcgtctgagcagcacaatagagccaaccctgttggcaaaggtgtgggtgagtaggccccaattttgtgatcataaaaagctgtcctcattacttacttctcatgaggaggaatgggtgggagggagatgtccccctcaaacacccatcaattcgtgggagagctggccctgagatcataagagcaagagagctaattctctgcccctcattgctgtagcactggggaaagtggctcctactacacaaccggccaatctaatagagctaaccctgaaggtgtagatgtaggagatttgattcctgaggacataaaagcaagagaacctgccctgcctcttgatcattgcttcaaagggtgaactagccaaggcaatgcagtggccagtggtggtgaggacaagagagagctggcaggcctggccaaccctgcaaccacccaggtctagaacctaggttatgtgttggcccaccccaatatcgaccgtatctgtcatctgctggagcacatggaggtaccagtcatgcagacccaaagctgcagcatctccacaacacatggcaacagcaggataaccaaggggagttccagtgagggcccagcatctatagtatagcagaaaccagagacctcgaaccagaccaatgattcttcacagtcagcactttcaaataggtaaacaggcaaaagggtcaagtgcgtgactctctgtatcataccatggcttctatgatgagatttctttccctttattttttcctttttctcttaagttttatctggtggtgtggcagctacaagggcagaaggtagataagaagggatgggaaatgaatgggatcaagatgtaggatttgaaagacacatagaataaataaaaagaaattttaaaaaatacctatactttaccgaataggaaagtctaaaagaaatggacagttttctcaatgaatacaatttaccaaagttaaatctagatcagataaacaacttaaacagacctataacccctagtgaaatagaagcaataatttaaaatccaccaaaaaaagtcaatgtccagatggcttttgcatagaagtctaccaaactttcaaagaagaattattaccagtactcctcaaattattccacaaaatacaagcagaatgttgcttaatttgttttatgaggccacagtcaccctgatacacaatccttataaagacacaacaaagaaagagaattacagaccaatttcctttatgaatatagatgtaaaaatgctcaataaagtacttcaaactgaatccaagaacatatcaaaaagatcatccaccatgatcaagcaggcttcatgaagagatggctcaacatttaaaaaaaaagtcaatgtaacccaccatataaacaaaacctcacatgattgtctcattagatgcagaaaaggtctttgacaaaatctaacaccccttcatgataaaagtcctggagagaatagggatacaagggacatgcttcaacataataaagatgatttacagtaagcatataggcaacatcaaattagatggggagaaacacaaagcaataccaccaatatcaggaacaaaacaagactgtccactctctccatacctattcaatatagtacttgaagttctagctagagcagaaaggcaactgaaagagataaagtcaatgcaaggtggaaaagaagaagtcaaagtataattatttgtaggtgatatcatagtatataaataagagtccctaaaaattctaggaaatacaggaaactactatagctaataaacacttttagcaaaatagctgaatacaaagtcacttcaagaaaattaatagccttcctatatacaaattacaaattatctgaaaaagaaatttaaaaaaatacccttcataaaagcctcaaataatacaatgtgtcttggggtaattctaaacaagcaattgaaagacttgtatcataaaactttaagacattgaagaagatatcagaaagtggaaagctcgcccaggctcatagatcagtagcatgaatatagaaaatgcccatcctaccaaaatcaatctacagattcaatgaaatcccaatcaaaattccaacacaattcttcacggatcttgaaaggaaaaacaaaaagcataacaggttagctaatattaagcacaaaaaacaagaatatgatcaatggaatcaaattgcagacccagacataattccacacacctgatttttttttataaaaattcaagaaacatacactggataaaggaaagcagcttcaacaaatggtgctggtcaaactgtacgtctaaatgtagaaaaatccaaatattcaaatacaaatggatcaaaaacctcaatataaagccaggaacacagaacctgatagtagagaaagttagaaatagccttgaactcattggaaatggaaaagactttctgaacagaacaccattagtataggcactaagatcaacaattaaaaaatgggatttcttgaaactgaaaatgcttctgtacagcaaaggatacatcattcagacaaagtagcaagttatacacttggagcaattgctcatccagttgaaggctaatatccaaatactcaagaactcaaaaagctaaatatcaagaaaacaacctaattaaaaatatccccccagaatagtacagatttgaagagaggtctggcacagggaaaatgttaggggattcacatgggtgaccccaactaagaatccaagcagtggtggagaggctgcctctgatgccattcccctataatgagattgatgactaccttggttaccattcctagagatttcattcaatagctgatcgaagcagaaataggcacccacagctaagcactgaaccatactcctggaatccagttgtagacagggaggagggatgagcaaaggcgccaagatggggctggagaaaccggcagaaacagtggacctggcctagtgagagcatgaagaccctagtcataaagctgcagaaacagcattggaccaaaccaaggcctatgaatgtgggtgccagctaggaggccaagacagtctatgggacctctaacagtggagccagtctttatccctagagtataatgaactttgggagcccattccctatagagggatactattgcagcccagatacagacaggaaggagggcctaggccctcctggaaatgatatgatggactttgattgtcccccatggagggcctcactgtccctggggaggagttgggggtgggttggtgggttggtggggaacatgggagaatgggagggtaagggaatgggggatgaacatgtaaatatgagtagtaattaaagaataaaaaatatacccccaaaatggtatatagctctaaacagaggattcttaaaagaggaaactcatatggctatgaaacaaaggaatgttcaacattctgagtcatcaaggacatgcaaatcaaaactactgtgagatttcctcttacatctattagaatatttaaaatcaatgaaacaaatgacagctcatgctggcaaggatgtggagtaagggaaacactcagtcattgatggtgagatccagctatacgactcttgagcagatacccttaagaatgtttcatctgtcatactatagggccacttgctcatacatgttcattgccgcactattcataacagtcagaaactgcaaacaactgaaatgttcctctgcagataaatggataaagaaatatggtacatttacacaatagaatattactctgccatttaaaaaatgataaaatcatgaagttcacaggcaaatagatagaactaaaaaaaatcatgctaactgtgatatcccagacccggaaagactaatatggtatgtattctatgtggatatcagttgttaagccaatgctacaatctataaaaccacagaggttaggtatagagtaagggacttgggaggacagacagatctcccaaggaaagggagatagaatagttatagattgatggggagtgggagaatcaagtgtgaaggggaagagaaggggaaatgaggaagagaaaacaggcagagacagctaaaattaaggactacatttgaggtgtagtgttgaaacctaatacagtagaagctttcaaaaaatacacagatagatgaaggagatctaaatgaaatgtgaataacaggggagagagagtcccaattggacatctcttgttaccagatgaagcttcccgtaccagtattgcaggccaaagggatcccatgggaaatcctaaggaacccagactcttgccaatactttgggggtttctccacaaactcacagaaagaccctgttgctgaagacagcacctacacaactcattgaacactggaacactccagctgaggcctactagagctttcatccctgtgctagcatctttagtaaaggaaggtactctgcatgttaccaaaggataagcataaacatcaatccaaccacaaacccttttatctacagtggtgtcctgtctgcaagataggctagtgcaatggtgacatgaagcttatggggataaccaaccaatatctgacatgctttaaggcacacatcagaagaaggaacccatagctgacattgcttgggtgaccaaaatcctgaaacttgatagcccatggacctggggtaaaactactagtttaaaaaaaaagcagcaataaaatggctcataatgacattctgctagacctttgctcagctatcatcagagaaacttcctcctacagaagatggggacaaatacagagacccaatgccagatattatgaagagaaagacaggccttggaatattcagtccccaacaaatgccttttctgaagacttagggaaccctgcaaaagaggaagcaaaaagagtataacagccaaaggagctggaggacaccaaggaatcaaggccttcttggcacaacaaggctggtgcctacatgaactcagagactgaggtagcatgcacagggcctgcacagatctgcaccaaatggggtccaagagctgaaaaaccagaaacatgccttcctccctaacccagaagctatctccaagtgacaagcacttgcaaatgaaatttcagttttctccaagggagcctactcctaaaggtaggctgcatggccaacagaaaacgaattcaagggcatcattggcggttccttttctcataacataataacagggatttttttctactattttttaaatgtatcacacttttatttttaattattattttttctttctttttacccttaggttgttttatggtttagtgtttttgtgggattgctgaatgtgtgaacaagtgtgtctcttcatctgtatcagtttcatgtgccttcccttaggcactttttcttctgtttgtttggttgtggttttttccctattcctaaacattattttgttttatcatattatattatattcccttagaagcctgattgttttctaatgaggggtatatacagaaagggggtatatccagatgtgatgagacgggaagaattgggaggtgatgggggagccacttttaataaaagggggaaaacacttccaacacaggaaattttaaattgaaagaaaatgctaccaaaaaggcactaattttaaaatttatgaatatttatttctgaaatgttatattttctatttctgcaattcagttaagtccaagcaactgaaaccataaacataaacatatggatgaagagagattaatgtatactaatttcatatgcagtatacttaaaaatgattcatcacagagatgcgacaaactaccaagctggataaccactgcctggatattcaactgagaatataaactcgtgtttttcagggtgctctgttgataatacatctacagttctcactagaagtgtattgtgaaccaacaacaccagtaacctcttactattttatagaattttgttttgagttcagatttttctgttggaagttttaacatgagcaaatatttatttaaatcaaataacaagcatttatttagcatacaaactaaaattttgaatacaccctgaaagttccagatgcaaagacaaaggtcttttgggtcctcacaattacttggcaagtaccttcctggtgaagccatcccctggaccctgtagacatgctctttttccctgtgcttaattaatggcaccaagagctggagatagctagagctagacagatagacaatgattaaaaccagaactgtgctttctgagaactcatgttctgtgccaaccattcacgtctagcatctccgggggatacaacaccctcttatggcctcctcggacactgcactcactgaagcacacaacacacacacacacacacacacacacacacacacacacacacacacacacacacactttaaaatgaaaataaaatattttcaacaaaaaggcagtgggagcttaaccagctattatatacttgtgtctttaggacatgtagtcatgcctgtaatttcaccaagactgtgctatttggtgaacggggctgaaactatttctcctttgtatcatttattgaagattaaaagtggtcttacttttgaaatatgaaatcccagaactaggggattactattttatattacatttcacaagcattcatttcccatatttataaatgtaaaagaacttatcatatgtagggaatgggggggagccacattggtagcagaagttcttctgtgaagcatttgcctcccgagttataggccctagagaacagttaacttatgttgatcacatctttttcagtttccttcatgttttccttccacctacagtttatcccaccttctcctatcaatttctatattagcttgttacataaaaagcagcccccaaaactctagtgctttataatgacaaacacattccttgcccaagaagcatgctggtaattgctaggtagctatgaagttaatcactgtatgtagcatgtgcactggtgtggaaggagagatgagaaggagacattacattgtgcgtaaaaccttctgaggaaagtgcattgttacttcttcatacagctcactgagtatattcaacatgatggagctgacattgtatagaagacttttcctgggaagatgcagcacacacacacacacacacacacacacacacacacacacacacacacacacacacacacacacaccttctcaccctagtgagtgaattcatgaacgaccaaattaatgactgtaccaaagtccaacttggtgaactatattagggttactaacagaagtaagggcgaggaagggtcactgagaggagcagggatgacttgaaaatcatagagcttattaatttcttactttgccgtgtgaaaatgaacaagtgtggcccagcaagtcccaagtccattttatgttagctattcaggcaaattgctgagttcttccagcctgcatttgataaagccagggactttgcatcataatgggcaggagcagtcactggaaaaaaatctgtccagaattgtggggtgtttctgattactcctaaacaatcccagacttcagtaaatgcagtgtttccattggaagaggagccctgctgagctgccggcttcagaaaggtaacagagcccagagcgccctatagtggccactaaagcttggtgcttaacaagaactccagaatcccggctttctgcgtttgacttctctatctctgccagaagctgggtttttagaaaaactatccataacatcctaagagacctgttccccgtgtcacaaacgtgtttacttgaaaagtaccaagcaattcgattctcttcacgtaaaaataatagatgttagtctgttgctctcttaccctagaactatcataaacagatattcgatttggtttttaggaaggaatgaagctttgtcttggggcaagagcttgaataatttgcaatttagattttgtttttattaatcacaggtcagtgcactatcacaaagaaatatctaagtagtttctaattcttgatatttccaaaatgattacacagtttattaatgaaggtcacagacaccccagtttactggtgtcagtgaaaacctgatgccatgtgttaattaagaatcaccatggcgatgaaaatgggtgtcactatgccagtgcgctgctatggatgtgtgagttcgcagcgccctctactggatagcacatggctggtgcaggctttttttcttttcttttctctcttctcctttcctttcttttcttttcagctaaaatcccattaggagcactgggaacttcatcccttacagtgatcgcaggatgaggccttatattaaagctttggaaggaacaagttattaaggctttattgtataggtatggattgttttcaaacaccacgcttttctttctccctgaaatttcatttcaaatatgattgcttctgtgagaaattagcaattgttagaaaatgagtcgagagacttagcttacaatctgactctccttttgagcacttagatgcattttttcacgttacagaattagaatctaattcatataggacatctttaaaaatgtctttatactcccaaaagaaatgccttcgatgcgtgttaaaaacaccaaagcttacaatcacatgatctcggcttaggatagagtgaagcaatatagtcttggagagaaacaagtttctctccctctttctccctcctcctctctttttccccttcctgctccctccctctctattctcctttcccttctctctccctccttctccttcactttccctccctgctgttctgtcccctcccagctatccctcctgagtccccttcctggactgagggtctggatggtaggagttgttcctcctcctggccaacttggatcttaccttaagtatcctgggccacatgcccctggaccccttctgtgatgtctctgagctatgaaaagcctcaaatctcagagtgctataaaaggagtggggtttgttgttgttgttttgttttgtttttttaagtgaagaaagatgtaatgtaacctatatccccacactcagaatgaagcatttctatccacaaattagtcttaactaaacatgaaaacatgtaccagtttcctgtttctgtgaaagaaatcacctgcaaatcaggcgggtcttaggataagtttaccctgtaaaagcttgcttattgcacttagtggagctagtttagggctttataaacatggggaactgcattcagatccctgcaccccatataaaaactgaatacgcctttaatcctagcacttggcagacagaggtagccatcctgatctacagagcaagttccaagacagccagagctacacagagaaaccctgtctcaaaaataaataaataaataaatcaataaatcaataaataaataaataaaagctggatgtggtatgtgttggcttgtatctgtaaccccagccttaagtgggacagtaacagatagacagatccttgaagttcattgtagccactctaaacaagtgagctccaagttcagtaatagattctgtctcaaaccacaagatggagcacagtagactaacaagggaacaaggtggagcacagtagaggaagccctccactttgatctctgtcctcagaatgcaagcgcacgcgcacacactcacacaagcacacgcgcacacactcacacaggcgcgcgcacacatcagccatcctcctttgtctatacagaacacagaacatgggcagaggtgccttcaacaggaaaaacaatctccttcccagaaaagcagtgatgatagcccaaggcatttcaaagaaagtgttagaatttatttacactataaatgtctaaatagaacatttaacttgaccaaaaatgaattgtccttcgcattttcctccattcagtatatttataagacttgcatttgtgatcaacacgaaacagtagaaacagccaaagaaaccaggagctttgaacacaagaagtacagaacagcagaggccagatttgtgacatttcgatacagcccctgggaaaatgcatggctctgtgaataatggcaacatggttgcctgtttctcccggtggcaaagatgaaattattaagtgctgcacttattaaaaaagaaattggaaaaatattctctaagcctggaacataagatggtgtcaagatactgtggaagacacactgcttgcattgactggacaataatcaattatgtaaatacctgttaatcattctgaatattcattggcaactaactataaatcacatgaagtcatgaatttgatttccaatttattttgttaggctggaaagatgcctccgtcgttaagagtacttggtttggtttggttcccagcccccacatagtggctcacaacaacttgtaactcccattctgggatttccaacaccatcttctaaactccatgggcgtcaggcatacatgtagcacacaaacgtactggtaggcaaatactagtacacataaataaacccaaaacctttgtttagaataaaaagattaattaattttattatttactgcacttgtgcacgggtgcccacagaggccagaaagggcatcatgaccagctggagctgtacttacagacagctgtgagctgcctgacttgagtactagaaacctaacccaggacctttcctagcccagagagtacccagaactgctgcaccatctctctatctcaagcctaggaattttctaatacatatttgtaacaattcatttgtttacagaacatttgtttatagtttctaaattattttaggacaaattgtttatataggaagaggtctagaaaagtgggctcagaagcgcgcgcgcgcgcacacacacacacacacacacacacacacacacacacacacacacacacacaaactcagggtagccagaactaacctcttggctgtctccatgttcaaagtaaattcttagtacccaaagggaaaggacaaccatgtgttggtggcactggtaataattgctgcccacagggatggagctagatctgtgtgttcttccattagccacataatttaccatctatgtctagcagttaatttcctttgtgggtggagagatggcttagctgttaagggtgtttactcttcttttcagggaacctacatcaggtggctcacaactttctatgacttcagctccacacaatgctgcaccctcttctgactgtcacaggcaactgtacccgtgtgcatgtataatttttaaatcttcttaaaaatttaatttctctgcaaatcaaaacaactctgagataccatctgactcctgtcagaatggctaaaatcaaaaacaccaatgacagtttatgctggagaggatggacccctgagcaaattgagagcattgaaagaggaagtagggaggaagaggaaggatgcagaagtcatgagggagcagaaaggttgaatcaggtgaagaatagaagaaagggtataggttgggttttagttggggaggtggtcggggaggacaggagggagaagggaactgggattgtcatgtaaaacaatcttgtttctaattcaaattaaaaaatgataaaaaaaagaaagaaggcgcaataaaaaatttaattactcagttgtttgcaggtttttgctattacaaataaagctgttattaacttaattgagcaactgtccttgtggtatgattgagcatcctttgggtatatgcccaacagtggtatagctgagtcttgtggtaagttgattcccagtgacttccaaagtggctgcacaagtttacactcccaccagcaatggaggagtgtttcccttgttccacatcctctccatcatgagctgtcctgtggagagccacagccctaagatggcgcctggctggatgccaggtagtccaagcttagctgtaaacaagccttatttggaagtgcttgaggcatctggcatgcttcctccttctgtggcctatccgggattgccagatggcatgagctgattgggcactgagcatctacttaagggcttgtgggtgctgggagaagagagaagctcttgtacaaggttcctgaataaactgcttgaagaagaatcgtggttgtgtttctcttgttggtcgagatagacgtaacactgtcccttgtatttttatcttagccattctgacaggcctaaagtggaatctcagggtcctttggatttgaatttccctgatggataatgatattgaacttctccttaagtgtttttcagtcatttgggattcttctattgagatctgtaccccatttttaatgtttttatttgaattagaaacaagattgttttacatgtcaatccctctccctccgctccttctctgtcccccacaactatcaccctacctatcccataccctttctgctctccagggagggtgaggccttccatgggaggatcttcagagtctgtcataaactttgggatagggcctaggcccatacccatgtgtttaggctgagggagtatccctctatgtgcaatgggctcccaaagcccatttctatgctagggataagtactgatctactacaagaggccccatagatttccgaggtctcctcactgacacccacgttcatggggtctgaatcagtcccatgctggttcccccgacatcagtctgaggaccaagagctccccgttgttcaggtcagctgtttctgtgggcttcaccagcctgctctgggcccctttgcccatcactcattcttttctgcaactggattccagttcagtttagtgtttagctgtagatgcttctacatccaccagctgctggatgaaggctctaggatggcatataagtcagtcatcaatctcattatcaggggagggcatttaaggtagcctctcctctgttgcttagattgttagttggtgtcatctttgtagatctccagatatttccctagtgcctgatttctctttgaacctataatgcctccctctattatggtatctcttatcttgctctcctctattcttcccccaattcaaccttcctgctccctcatgtcttcctcagccctcttcttatccccttctcctgtaccccatttttttattagattatttggcttgttgatatctagttccttgagttcttcatatagtttttaaatcagccctctgtaagatgtggggttggtgaagatcttttcccattctgtagtcttccatttggtactatcaatggttccctttgctttacagaaactcttaacttcatgaggtcccatttattagttgttgatcttagtgccttgctattagtattctatttgggaagttgtctcctataccaatgcatttgacattatttctcactttttattctatcaggttcagtgtaactggattaattttaaggtctttggtccacttgaacttgagttttgcacagggtgataaatataaattgatgccaacatccagttagaccagcaccaatcattgaaaatgctttctttttttccattgtataattttggcttctttgtcaaaaatcaggtatccatgggtgtgtgtatcaattctattgatccacatatctattttttgctaataccatgtggttttcattactataactattgcaatagagcttaaaattaggaatggtcatacctctggatcttcttttactgtacaggttgttttggctatcctgggtttttgtttggtttttttttttcagatgaagctgagtattattctttcaaagtctgcaaaaaattatgttgtgattttgatggggattgcattgaatctgcacattgcttttggtaagatggacatttttactatgttaatcctactgatccatgatcatgggagacatctccatcttctaatatcctcttctatttctttcttcaaagactagaaggcctttcacgtgcttggttgcagttacaccaagacattttatattgaggctattatggagaaaaatgtggtacatttacacaacagagtattacttagctgttaaaaaacaaagacaccaggaaatttgaaggcaaatgtatagaactagaaaaagaaaccatcctgagggaggtaacacagaccaataaagacaaacttggtctgtactcactcataaatgggtattagctgtaaagtaaagaataatgatggtataatccacagacccagagagactaggtaacaaggagagttcaggtggcaggcacccagatctccctgggaagcagaaatagaggagatttcatgagtaccctgatggcatgtggggatggaatatgagtgatcagattccagggagcacagagagggagagtgctgagggagactctgggggatgcatttcagggttgggcagaagcctggcacaggggaatctccagagagtctatagacaggaccacagcttagactcctagcaacaatggataagtagcttgaactagccatctcctgcaagcagatttgtgcctggcccaattatcatcagagaggtgtcaaccagcaactaatagaggcagatgcagagactcacagctgatcctgaggtggagttcaggaatcctgcagagaaggagaaagaagtgtaggagccagaggggtcaagaacaccgcaggaaggctcacacgtcaactaacctggcctcataggggttcacagagactaaaccaacaaccagggagcctgcatgagactgacctaggcactctgcatatatgttacagttgtatagcttggtcctcttatgggattcctaacaatgggaaaagggactgtctccaactctttactggtttttggaaccctacttcttgtaatcggtctccttgcccagccttaatacatgggatggcacttagtcttactacaaattaataggtcatgtttcattgatactcattggagacctagatggagatgaaagtggagaggattggagagttggagggaggggataggggagaggaactgggagggaaggatgggaggaatatatccctgtgccgggatataagataaataggtggataaaaaattgaatttattttcccactatacttttattaacatatggtgttaatggagtactgtatgatgtttagatacattgtaatgttaagtcaagtaaacttttgtctctatggtgaggaatcttggctgtcaatttgattgacttgaaactcacttaaggggattagtgaggccagctgtgggtataaatgtgaagccatttctgcagatgattcactaacatagaagacaagccctgaacatgaacatcaccatcacttaggctggggaccagaggggaaggaggagggaaatgaagaggcctgctgactcaagcactctatctttctgaggtgagctgctctattgaaccatgctgtccctgccaagacagaatgagaactgtgaaggcatgagatgagggaattccctcaacttactttgatcacatttttgccatagaacaaaaaactaacataatagagcaaatcagtatcagagaagtagaatcattgtcatgactacccaatcatgaagttcagctgcctaggaaatggtgtgtaatgggaagagatttggaaaagtttcaagaaccaagatagaaaaggcctaaatactatgaccaaagcttaaatgagttctagacgttggctcagaagactagaatgccaatagaaatgtggacagtaagtaatattttcatgatgtttcaaatgggaataaggactctattgggaactggacaggagacttttgaggttttatcgatgacctgagactgctgattctctccatttaaaataataggaggtttatgaagtaagacaactgtctattaaatttattgccccaaagatagcatcatgaaattatgctaataataaagactaataataataataataaagatgtaataatgactcataatgcatatgtatgtacattagtgtatgtgtacatgaatacagatatgtgtagaggccagatgagagtgccagatgccctggagctggtcatgggctgcccatcattgttgctgagaactaactctaaccctctctaagggcaacaatggttcctaacctccaagctatctctttagcctactggttgagtgtttctaaggtgaatcttacaagggggaatctttttgaaattgggtagttgttttgctatattttaatagctttgggttggtataaacagtgaggcagggggtccaaaggaagtcttcatgaataaattggtagtcctgatggcaatggtgaagctgttttcacttgatcccagaagtttaaattaaggataaggactaatactgtcccttctgttgtacagacagagccaagtaattctgttgatttcagcagccacaccattgactttggccttaggcctatggaaccaataaagccctggtcagcaatcacaaaggagggggaactgtacaagttactacagcatctattctgttgttcctattaatagcttaatagctaccacaaataactagaaattgaatttatagcatttaagaggaaggggaaacagctataattgtagtaaaaatccaatgttgcaataaactgaacacaatattatgatggagatgaaatgagaaaaggttaattggattaccatgattcctcactgtaatttctgcagcatgtaaaaaatcacagcattcttctctctgtgaacatatgtctcttcatctaacttccctaaaatacctctcacctggacccactgtcctggataagtctcagatatcattcggtagtcaaatatcatacatttaagaaaataaacatgatatcccataaccacattgagttgtgccaccccattgtcctacagtaatctgtgaactcctggccctcttagcagacttcacttagtgtcacaattcccatgtactttcctttcttgtggctaatctgtatattgtcaggagccaagatctctgccttgttcgtcctgggcttaccctagtgcattaccatgtgatcagtatttagtattatcaagatgtctactgaatattatcagggagatcaaacttcccacaagaaggatattaactagaatgaatgtatttaagtgaattttcacgcagcaatgttattttatgcattttgctctttgaaattttttaagaattgtttctgcctgaaaaagactctaaggaactttctgaattgtcataaacaaaatggaacaaggactgactcttgggaaagctgctagcactttgtgcgcatcgttgtttagcctgtaggtctctttgtcaactccaaaagtcaattctaattagggcagatccaagcatttagctacccaagcaatagaagtgacaatatacaatttggaggataaatccctcaagctacataaaatattatcgatgctaaacaatcaatgcactgatagaaaaaaaaaaacaaaacaggaaaaccatatactaagaatcatcacatggacttgaaggacatttaattggtaggacttcctgaagagtagtataaatctcacagtgacatttaggaaggttttaatctactaggtattccattaaacaactaatctctacatctaccaatatatacaaaatcttttataactgatagcatgaactagcattatgaaatgactactttaatatgcagtggtgttggattttatttttgaacactcttcacagttttctgagcatgggcatttcacagctaaaaatgtagagaaaccctgatgctccctggcttctctcaggtttggacacctgtaccactgctctgtgggctccattgtgtctatttcctcaacaagaagggtacaagtgaaacatagcagttatgtgtgacttccttaaatctggagttggggtaagtctgggtgcagaggacttggctgactgctcactagctgtgtgttcacctgcttctcctcagatcccagcagaagtccatatttcttccagaacaagagcccttcattaggaagattttttttgtttttgtttttcgagacagggtttctctgtgtagctttggagcctatcctggcactctctctggagatcagggtggcctcgaactcaaagagatctgcctgcctctgcctcctaagtgctgggattaaaggcatgcgccaccaatgcccagcaaggaagaattcttaaacacttagtgaaaatgaagatctagccaaccatcaccaaaattagtatggaatttcttcaaagttataaaaccgcatcaccagacaacctagctgtattgtggggtacccaaaactcagaaaactaaatatcacttattctgtctatattgtttattttctattaatgtaacaaaaaaatcatgaccaaaagcaatgtatggaggagaggctttgttttagtttatggctccagagggatagagttcttattgtacaacatggtggcaagagcaggaagcttgctggtcacatttttactgtacaaggaagcaaaggggaagaagcaggaagtggagcaatgctgcaaatcctctaagtgctctccagtgatgcgctttctctaacaagtctctacctcacacatgttccatgacctccccaaacaaccccaccaactggggaacaaatgtcaaaatacataagcccatggacaatattttagattcaagctaccacactctcatatgcagcattaagatttttaaccaaagacaagtaagttaaggggatatttttaggaagaaggagaccattgaaatattcagagtacaagaaaggacaatagatgtaatcaaagttcattatatgttatcaaaatggcacaatgaaatccattattgaatctaatgaatgtatgctaatatattgaagcaagagatggaagaatctcaggcattaaagatccaatagaagaaatagatacatcactcaaagaaaatgttaaatccaaaaaaaaactctgatacaaaacatccaggaaatctgggagacaatgaaaagatcaaacctaagaataataggaatagaaaacagaaaagaatctcagattaaaggtccagaaaatattttaacaaaattatagaaagtctcctcctcacataataatcaaaacactaaacacataggacaaagaaagaatattaaaagctgcaaataaaaaaggacaagtaacatataaattcagaccaatcagaattgcacctgaattctcactggagactctaaaagccaaaagagcctggatatatgccctacagactctaagagatcatggatgccaggcaagattactataccctgttaccataggtgaggaaaataagatattccatgataaagtcaaatttaaacaatatctatccacaaatccagcccaacagaaagtactagaaggaaaattccaaaccaaggaagttaacaacacccatgaaaatataggcaacaaaaactcacaccaacaaaaccctaagaagggacacacacacacacacacacacacacacacacacacacacacacacaccactctaacattaacaatcattgctcatagatatccctttatatcaataaaaagacatagagtaagagaatggttgcataaacaggatccatccttctgctgcatacaagaagcacacctcaacatcaaagacagacttacctcagaatgaaggttcagaaaaaggttttctaacaaatggacctaagaaacaatctagtatagtcattctaatatctaacaaactgacttcaaaacaaagataagcaaaagagacatagtaggacacttcatactcatcaaaggaaaatcaaccaagaagatttttttattcttaatatctatccccccaaattaagggcacaaatttatcaaagaaaaactactaaagtttaaatcatacatcaaccttcacacattgatagtgggagacttcagtaccctactctcaccaatagacatgtcatccatataaaactaaacagagaagtactggggctaacaaatattatgagccaaatggacctaaaagatatttagaaaacatttctcccaaacacaaaagaatacactttcttctcaacacctctaggaacatcttccaaattgaccacacactaggtcacaaagcaagtctcaacagatacgaaagaaaaatgaaaaaaccttatatcctatcagaccaccatgaattaaagctgaatcgaaacaacagaaacaacagaaagcctacaaacttgtggaaactgaacatctctccactgtgtcaaggaagaaataaataaattaaagacctcctagaatgcaacaaaaatgaatgtactcccccatacccaaatttatgggacacaatgaaagaggtgtactaagaggaacgttgatggcactaagtgctttcattttttaaaaaaatggaaaaatctcatactagcaacttaaaagcacacctgaaagttctaaaacaaacagaagcaaacacacccaagaggagtagacagcaggaaaatcaaacatggggctaaaaaatcaatgaaatagaaacaaagagaacaatacaaggaatccatgaaacaaagagttggttctttgagaaaatcaacaagataaacaaccccttacccaaactaactaaaagacacagagagcattccaaattaacaaacttgtaaatgaagaaaatccaaaaaaaaaaaaaaaaaaaccaatagggtcacacttcaaaaacctgtactccacaaaattggaaaatctaaaagaaatagacaaatttcttgatagatatcatttgccaagttaaatgaagaccagatgaataatttaaatagacctataacccctaaggaaatacagcagttattaaaagtctaccaaccaaaaataagccacaggccatataattttagcacagaattctaccagaatttcaaataataaatattcctaatactcctcaaattattccacaaaatagaagcagatggagtattgccaaatttgtttatgtgtccctgataccaaaaccacacaaagagtcaacaaataaagaaaattgcatatcagttttcctcatgaatattgatgcaaaaatactcaatataatactcacaaaccaaatccaagaacacttcaagaatatcatccaccatgataaagtagggttcatccctgagatgcaggggtggttcaacatacaaaaattagtcaatgtaatccaccatataaacaacctgaaagtaaaaacacatgatcatctcattagctgctgaaaaagtctttgaaaaaaaagcaccccttcataataaaagtcttagagagacatatttaaacataataaaggctatttacagcaagtttatgcccaatatcaaattaaatggagagagacccaaagcaattccactaaaatcaggaacaagacaaggctctcccctctctccatatctattcaacatattaagttctagctagagcaataagaaactaaaggagatcaaggggatacaaattagaaagaaaaaagtcaaagtattaatatttgcagatgatatgatagtatacatgagcactccaaaaagttctaccatggaactcatacaactgataaactcctccagcaatctggctgaataaactcaaaaaaacagtagccctcctatgtatgaatgataaacaagcgtctcctttcttgccctcctctattcctcccctgtctcagtcctcttgttttcctccccccactcctcttcccttcccacctccttcctctccacccctccccgtgctcccactttgttcaggggttcttgtctccctctccttcaagggactatgtaatcttctcttggggtcctccttgtttcctagctcctctggcagtgtggattgtagactggcaatcctttgctctatgtctaaaaatcatatatgagtgagtacataccatggttatctttttgtgactgggttacctcactcagcatggtttcttcaagttccatccatttgcctgcgaatttcaagattccattgttttttctgctgagtagtactccaatgtgtaaatgtaccacattttctctatccattcttcagttgagtggcatctaggttgcttgcaggttctggctattacaaataatgctgctatgagcatagttgaacaaatgtctttattgtatgaatgtgcattcattgggtatatgcccaagaaaggaattgctggatcttgaggtaggctgatttccattttcctgagaaaccaccatgctgatttccaaagtggttgtacaagtttgcactcccaccagcaatggagaagtgttcctctttctccacatccactccaacatagactgtcattggtgttattgattttagccattctgataggagtaagatggtatctcagagtggttttgagctgcatttccgtgatggctaaggatggtgagcactttctcaaatgtttttcagccattttagattcctctgttgagaattctcaatttagttctgcattccactttttaattgcattgtttggtgttttggtggctagcttcttgagttcattgtatattttggtgatcagccctcatcagatgtggggttggtgaatatcttttcccattctgggggctagcattttgtcttgctgactgtgtcctttgccttacagaagcttctcagtttcaggatgtcttatttattaattgttgatctcaatgtttgtgctactgctgttatgttcagaaatcagtctcctgtatcaatttgttagaggatatcacctaccttctcttctaggaggttcagtgtggctgaatttatgttgaggtctttgattcattgggatttaagttttgtgcagggtgatagatatgatctatctgcagtcttctacatgtccaaatctagttatgccaacaacatttgttgaagatgctttctttttccattatataactttagcttctttgtcaaaaatcaggtgttcataggtgtgtgggttaaatatcagggttttcagttggattccattggtcaacctgtctatttttgtgccaataccaagctgttttcaggagaatggctctataatagagcttgaaatcagggatggtgatgcctccggaaattcctttattgtacagggttgctttggctatcctgcgttttttgtttttccatatgaagttgagtactgttctttcaaggtctgtgaagaattgtgttgggattttgatgggaattgcattgaatctgtagattgcttttggcaaggatgccatttttcctatgttgatcctacctatccaagatcatgggagatctttccattttctgatatattccttaattagatgtcttgatagatgcagacagtacaggtatggagagaagtctggcacagaggaaatgttagaggattaatagggatgaccaaaactaagaatccaagcagtggtggagaaaataccattgatgcccttcccttcccctatatgagattggtgtctaccttggttactatttctagagccttcatccagtagctgtttgaagcagaaacaggcacccacagctaagcactgaaccatactactggaattcaattgtggagagggaggagggatgaggaaaggaaccaagacagtgctgaagagacctgcagaaacagtggacctgacctactgatagaatggagaccctagtcataaagctgcagaaacagcattggactgaaccaagccctctgaatgtgggtgcaagctaggagtctagggaagtctatggctcctctgacagcagagccagtctttatcctcagagcacaaatggactttgggagcccattccttatggatggatactattgcagcccaaatacagcaaggagggtctagaccctctcccaaacaatatgacagactttgtagatccttggtagagggcctcactgtccctggagaggagtcgtgggggaggggaacatgggaggagaggagtatgagggaatggggaatggatatgtaaatatgagtacttaaaaataataaaaaagaaataaaatttgtaataaaaacggatattagctgtaaagtaaaggataatcgtgctacagtccacagagccagagaaactaagtaacaaggagggactgaaatgggatgcatggatctccctaggaaggagaaattgattagacaaagcagtggaggggtgaagtgggagaaattgggactggggagaatcaagtgcggagaatatgaagggagagagcactgggaaagtcgactggaattggggggcatttggaagcaaggttgaaacctaatgcaatggaagcccccaggaatctaagactcctaacaatggggaatatgtagcctggatgggccatctcctataaccaggcaaaacttgcagtgtagatatttgggaaccaagccactcacaaagccttcaacctacaatctgtccaacctgcaagatatgctagggtaaagacaaagcaaaaattgtgggaatggccaaccaatgactggtccagcttgaaacccataccaggagagaaagttcacccctgctactgcctggagggccaggacccaaaggccagatagcgcagagacctaacatgactgggggacagggcaatgaaatgattccaaatgatcttctgctatactcatagactgatgcctagcccaggcaccatcaaagagcctccagccagcaactgaaggaaacagatgcagagacccacaggtggacctcagggaatcctgcagaaaaatgggaagggaggatttttaggagctatgggggtcaagaacaccacaagaagacccacagaatcaactaacctggactcataggggcccacagagactgaaccatcaactaggaagcctgaatagaactgacctaggccctctgcatatatgtaacagttgtgtagcttgtccttgtgggactctgactcttttctttctatggcttttgggacactattcgagatactggttgcctatttcagtcttaatatgaggaaaggtatagccttactgcaactttacaagccatgtttggttgatatctgtgagaggactgccctcttctggagcgaaacagaggattggataggtaagcagagaggaggtgggtgaacaaagactgcaaggagaagagagaggagaaatgttggttgggctctaaaaataaaaataataacaataataataacaataataataataataataataacaataataataataataataataaagataataataataataataataaagtatattgaaaatgagcccttactggaatccccaagagggctgtgtctccagtattttggaacttgcttcatgttaactcagactctgactgcaactgaaggtttacctaaaactccactctgtgaaacaccactggatggtgtctcaatcagtttaggccatcttaaccaagtaacgcagactgtatggcttagaaaacaaactagtatttgtcatgattatggtagaagagaagtttaaggtcaaggcactggatgacacaaattctcgtaagggatctcctcctgttttagggacagctgcatccttgttctgccctcatgttggcagaacaagagcagaagttggactctaatcccatagaccaggagaaatgatctccattagtctcagtcccctccctttcagccctatctccaaacacagccacaatattaattgagacttattgtatatggatttgggggtgcatggcaggtcacaattcgggaccatagcacatacaagattaaactaagccaaattatccatgcacattcaagaacaatgacagcagtaatatctactgcttgttaaacactgtcaccaaattattgctactgtttgggatcattgtagaaagtaatgttcttctctacatatcagtgaatattaaaggcttaaggtggaaataaagccccaccccaagccacacaaacacaaagtgacagactaagaacctaaactcatgtctgtacaaattcaaaatgcaacagaagtccctatgcctctccttttttccttctcagatacacctgagggtcttgtttgtttggtgtgtgtgtgtgtgtgtgtgtgtgtgtgtgtgtgtgtgtgtgttgggtattacttaaatgtttaagtgtggagtgtgtatgtgtgtctctgtgtgtgttgggtatgtagtttattgtttaagtgtggagtgtgagtctctgttctgtgtgtgtgtgtgtgtgtgtgtgtgtgtgtgtctgtgttgtgtatgtacttttgcatataagtgtggtgcgtgagtgtggtttatgtgtgtatgggcaggtgcatgcctatgcacacctttgtgtgtataaagaagccaaaggaggactccagtgtcctgctctattccactctcccttgtgagagacaggatctcttgctgagcctggagctgagctgtttacattcctacagggaactgaaatgggtgtgcagtatatgctcgtatcttaaacactgagccatctcctctgccccatatctgagttttgatgattacagaactattggtatgtcagatatttaataatgtgtgctgagggagcacacattattgcctatatatcttcatacgcctgaaaacacagatgtggaaccagctggttctaacaatgctttgatgtgctataagcacattttacagtgctgtacctcatccattcatcctcttgttctctgaaattccacgtttctctttgtgagcaccagctgttaagctaagctgaccttttttttttttttcttcctctgtttacccttcacatctggcttaattcaaatgtttagagatattgtccagcccctctgtgaagtagcaggtgctctcctgggcgcttcagacacttcagaaaagaaacagcaagttgtcctgtacttttggatcttataagaaaaacaaaatagctaacagatgaaaaaagtgaaatgcatactgcatagaccttataataagcactatggaaaataaagactagaaagagataaaggcatttaggcatgcgggggacattcagtgtgagcctctttgaaaagataactacgctgagttacaaagatgtaacagacatctgaagtgaaaacaagtttcacacacttgagcaacatcagggactcttgtggtacatgtatgagcaagctgcagatgtgtcagagaattattggggacttatcggtcatcataaggaatttcatttctaatactgaatcaaatggtaactcattgcaggaaccagagcagaaagatgacaaagaccagattgggggggtggggcgtaaagggtcatcccagctgctatagagagtggaggggacacaggacagaaatcaagaggccagtgagaaggctaatacaatacccacctaaaagaagtttgacagattggaccgaagtgggaggttctcgtgatggggaaacagattagatttgtgtctgcttagaatatccaagaaccttgtctactgggccagctctgcctcagtttttagccccttgaaagaaatgtctcagtaggcttagccctggactcatcatttctggcactggagtcctcacactcaaccacacattatttcaacttgcttattgaggcaacttcataggcttacgatctggtgactctggggcaaatagttaaagctcaaaaacgcagggtgggccagactaagtacgtcccagctcaccactgaggcagagcacataatgggatattggcagataatgagcttaactcgaaaacgaatgactctctgggccgagtgattctgcaaggggatgatccctgtggaggaatatgacagttttacaaagttccccacgtttcccaacagttagcgcacctgatttaacacttccttaatgaatagaaacagcattatgaacaggggcactgggatccgagaagcaagatgctcctgtcatgcagcgtcagggcaggtttctgtgtcattctttcatgagagagtggattggagttagaaatgacaaaaacagattaagtagctggctgaacatgaagcttgtttctgtggctcagcctgggaggggaaaagggagttgatctggagtacagcttgtctacggggtttctgcctctggggaagaaggcctggcgatgaaagactgggagtgacagaggcactatcttatttatggaactccccgccagggaacgaaagctgtatgcattgtttaaaataagcagcaggtaaggccctccctgtctgtatgatctcacagatgagtgaacaggctgcagccataggttccccagctttcctaagagaagtgctcaagtatgtgctgctgctgctgctgctgctgctcaccaagtgctaacagggatctggcatgttagtgatcctagcaggaggcagggcaggcatgacagccacacaatgttgagatttgacagcctgacagaccaggaaagcatcaaaattcagatatgagtggtctatctcttaaaatagtctcaaaacttccagcttatctttcttttcaggggagaagttatttttgtttttgttttttgtttttgttttctgaggcagggttcctccgtgtaacagccttgactgtcctggaactcactctgtagatcaggctggccttgaactcacagagatccacctgcctctgcctcccaaatgctgggattacaggtgtgtgccaccaccactcaacttttaagtgaatttttttaaaacatggtttgtggtgctttttactgccattcgaggcagagttctgagacatcctcaacatccattcagtcaaaccctaattaactgctgctgtgagggcttatgtagacagattagagccttgagccaagggatgttgagacataggaaattcctcactaggcatgatctacccaacccattgagtcttggttcctcctggttagaagggactcgctcagaaaagagttcctgttgttcactttataggtagtcagtctgcaactaggagccaacaacatcccaagctgagagaagaaatcaatggggacctcaggtcttcagccacagcagactgaattcttgcagaaatcacaatgagcttggaagttagggttcccaagagtctcaagaaagcaatcccgcattgctagcaccctgactgcactttgtgagacccataatggagaacagagagttacatgactggacttcagattcagaaaactgtgccttttaaaactactaaatttatggcaattatagaaatcaagtgcacattttaaaataaatcaataggagtggattacagtattcaattattatctcatgacaaatattctctgaagggatcctgtctttacctgaatgcctcccttaatattttttcttctagtgaaacttaatttggggatttcttaaagcatgtttttccctcgcttgtgttgcttacaataatcacgaggtcatttctattgtgaagttaagatacgtagcaaagaaaataatgccaaagacaaatttcataaatgccatgatttattatgtaaccatttgtgaatacactgtttgcctcctggtagtttatctctaactgatccattccatttaaactacctcttcagtttctttcctccctaatgtaggtagttcatagctaaactttttttaaaaaataatatttatggcattatatttctgcacacaatccatttatatagttatcagaaacaaaatgatgtaaaaaggctttcaagaactcaaatgaaaaatgctatttaaaaataaatattttggctcatgaaagtaaaagaaaccaatgcccaattaaggaattttgtccagactatgatctcctcggagttttatgtaaccagttcaattctgaagttgttggctgccaaataactaagcaatgtagagagtgttgaaaacactcatacatccaacttttttaattaaagttgctgctgacagtgattttgattttaaaatggcaaagggaacgagccctatcctttggtgtttaataaaagaagtgtatggatttgctaagtgaaatctacatctcatgccctatctataactttcaggtaagggtgaagataaaagaattaagcaaaggcctggagctggaagaagctaacttctgttgctaggaaacagatactttagagtccacactctagggttactactcaatgcagtgcctgatgctggttacatgctaatgaggctcttcaagttttaacctaacaaatggaaaggtagtaaagacatctaattgctagagagagcccccaacctggccaggcaggcaggtcctgtgatggtcagcctgtaagcaaactcagactcctattaatttaaggcaggcaacatccatctaaagcttgtgtgggcataggtgggattcttggcagcaaatggcagaaccttgcttaagtgataagaatattttgaagttacttgactagaaattactgaagtaacctaggcatatcccagatctaatgaagtacacaaatgtgattatctgtctctgttgtgggaacaggagtctccagagccccatgcctcacaacctaccacactacagctgtagttaggatgtattttcttttccaactcctcagaaaatgagtttgaaggagtataggggctagagtcatgtgcccattcccttgctgagagacgagaaggtagatggagatacattagacatggagtgtgcgttgtggaacaccccatagaatatgtccttaaggaaacttgaattctgtgctcagaagatgaggtgaagctagcacagcgggacatgtttgtaatctcagcctcaggaggctgagtcaggacaattacacatttgaagacagtctcaaaagcaaaagatgctgccgtagaacaagggaagatgaagataaagatatgaggagaaaggtgaggagaagggcaagatgctaggagacaaaacaaatagaggtctttgtacttgaagacagtccttgtctatgatactttcaagaatagtcattgaggatcatagattaggaagacatttctgaaataaagaaaatataaatataaaacacatacagagctggggagatggctcagtcagtaaaacacttgtcatacaagcatgaggacctgaaattcaaaaccctacatgtactttttaaaagccagatgtaccagtgagtttcttgaatactagcactggggagttggagtcaggagaatccctggagctttatggccagccagtctagtcatatgcacatgtgcacaaacacataaacatgccaaaatacttaaaattgattttgcaagtaaaatgaatgcctacacacagacatgtagataaatctactgaaagccttgaggttaaaaaaataaagggctccattttcaatgctatagtacagagcactctcaagtctctcctatggtctgtaattgaagaccctcttttcatgatagttgacgagtcagtgagaagcctgactcctactatcatcactatctatgctcagtcacttctatctatactgcttggacagtgcctggtagattggtaaaccatgctactaccccaaactaccttacttactgataatcccaccttctggaatatctgtcgtggctgttctctgcactttttgcacttacttggtctttctcagcaagtacttgaatgtgattgatagtatcctttgcacagcatatagaaaatcattgtaaagatatcatagaccttaggtgatgctagattcccttgtggtaaactggttcttgtttttgtcatgttcctgcaagaccaagcaattcaaggtcatcttaacccaatttattgcttggcattctcatgaccattggcatgactccaacatcatttatatataaaaagaggctgacacagccctggctttcctagttcttaggctatagcctcttaaaagttgcatccctaactgtagaagctttcattagagtctccaaatttggcatatcttcaactctaattttagtaccatttggtcagaaaaaaatcaaaagaacttagtctttcaattatttttttgaactgacaaatgtctacaggtcaaattacttttggaaaatttttgatttttgttaaaattcaattgtgctgttctcattaagaaactagttgtattaaagtgaaagtggggactagagagatgcctcagtgaataaagacacctgccatgatgtctaaggacctgagttcaaaccctgaggtggcatggtggaagaacaaaactgacatccacaagtacaaccctcccacacacacatgcatacatgcatgcacatgaaataagtaaaaagtaataaatttttaagaaaaaaagcaaaatagtacttaaaatagatacatatgatcagctatatctagtgaacttaagtctattcactaagtaacttttttttttcgtttttcaagacagagtttctctgtattgctttggaggttgtcctggaactcattctgtagaccaggctggcctcgacctcacagagatcccactgcctctgcctccccagtgctggggtttcaggtgtgcaccaccaacgcccggctcactaagtgactttagagacaaaaactgaaagagaggtaactcgtttctttcactcattcagtctcaggcaaaacaaagatcttgcaagaagtgggtttaaccccacagtctggtgcagatctcaggtttctaagtctgactaagaccaagaagttcagtagtaaaagaaaaatgttgaactgtttggtaaaaggaaattctagttcagccagttctcaaatccaggttctcaagcctatttgtataatcactacacttaaaaaaaagttacgccgggcgttggtggcacacgcctttaatcccagcactcaggaggcagaggcaggcagatctctctgagtttgatgccagcctggactccagagcgagtgccaggataggctccaaagcaaagctatacagagaaaccctgtctcgaaaaaccaagaaagaaagaaagaaagaaaggaaggaaggaaggaaggaaggaaggaaggaaggaaggaaggaaggaaggaaggaaggaagaaaggaagaaagaaagaaagaaaaagaaagtggggaggactagaaaaatgcctcagtggttaagacacttgttcctgcagaggacctaggttcgattctcagcgctgacatggcagctcacaattgtccataacttcagctgcagaggatctgacgtctcttctgatctccaggcacatgttcattgtgcagaaaatccatgcaatcaacccaactcatacacagaaataaaataaatctttatggaaattaagtaacacccaattgcacaattcatgggtccaagaagaaataaaaaaagaaataaaagatttcctagaattcaatgagaatgcaaacacaacatatccaaatctatgggatactttgaaagcagtgctaagaggaaaattcatagcactaaatgcccatgtgaagaaacaggagaataatcacactagagaattaacagcacaactgagaagcttgtttctgtggctcagcctgggaggggaaaagggagttgatctggagtacagcttgtctacggggtttctgcctctggggaagaaggcctggcgatgaaagactgggagtgacagaggcactatcttatttatggaactccccgctaacaagatagacaaacctttatccaaacataccaaataacgaagagtgaacaccaattaataaaatcaggaataaaaagggggacataacaacagaaacagaggaaatccagagaatcatcaggtcatactttgaaaacctatattcctcaaaatttgaaaatttaaaggaaatggacaattttctggacattcttcacttaccaaaattaaatcaagaacagataagcaacttaaatagatctataacctctaatgaaattgaagcagtcattagaagtctcccaaccaaaaaaaaggccagggccagatggcttcagtgcagaattctatcagaaattcaaagtacagctgataccaattctcctctaagtattccatacaatagaagcaggagggtcattaccaaactctttttatgaggcttcagtaaccttgatacccaagccacacaaagacacaactaagaaagagaactacagaccaatatccctcatgaacattgatgcaaaaattctcaataaaatattggcaaataggccgggcagtggtggcgcacgcctttaatcccagcacttggaaggcagaggcaggtgaatctctgtgagtttgagaccagcctggtctacaagagctagttccaggacagcctccaaagccacaaagaaaccctgtctcgaaaaaccaaaaccaaacaaacaaacaaaaagtaaactgaccaaacaaacaaacaaaaaattggcaaattgaatccaagaacacatcagagaaatcatccatccagatcaagtaggcttcatcccagggatgcaaagatggttcaacatacgaaaatctatcaatgtaagccaccatataaacagacagagggaaaaaaacatacctcttcaatattgtccttgaagttctagctagagcaataagacaacaaaaggagattaagggaatacaaatcggaaaggaagaagtcagactctcactatttgcggatgatatgatagtctacataagttacctgaaaaactcaacaaaggaactcctgcagctgataaacaccttcaacaaagtggaaggataaaagattaactcaaaaaaatctatagccctactatatacggatgacacattggtggagaaagaaatcagagaaacatcaccctttacaattgccacaaacaacataaaataccttggggtaacactaaccaaaaaagtgaaagacnnnnnnnnnnnnnnnnnnnnnnnnnnnnnnnnnnnnnnnnnnnnnnnnnnnnnnnnnnnnnnnnnnnnnnnnnnnnnnnnnnnnnnnnnnnnnnnnnnnnnnnnnnnnnnnnnnnnnnnnnnnnnnnnnnngaaaagatattcatcaaccccatatctgacagagggctgatctccaaaatatacaaagaactcgagaagctagtcccccaaacaccaaacaactcaattaaaaaatggggtacagaactaaatagacaatctcatagaggaatcaaaaatggctgaaagacacatgagaaagtgttcatcatccttagccataagggaaatgcaaatcaaaacaactctgagataccatctgactcctgtcagaatggctaaaataaaaaataccaatgacagtttatgctggagagctgtcggagaaagaggaacagtcctccagtgctggtgggagtgccaacttgtacagccactgtggaaatcnnnnnnnnnnnnnnnnnnnnnnnnnnnnnnnnnnnnnnnnnnnnnnnnnnnnnnnnnnnnnnnnnnnnnnnnnnnnnnnnnnnnnnnnnnnnnnnnnncatattcatataacaaggacatatattccaccatgttcatagcagcattatttgtaatagccagaaactggaagcagcctagatgccccttaactgaagaatggatagagaaattgtggtacatttacacaacagatactactcagcagaagaaaacaatggaatcttgaaatttgcaggaaaatgggtggaactcgaagaaaccattctgagcaaggtaacccaattacaaaaagacaaagatgatatgtactcactcatatggacctgctttatgatacatattagtgaccgtgctttatcagagctgttttaatgatgttgctcagaatggtttcctcccagatgatgattgagaagctaatttaaaaaaaaaatggtgccaagaaccacaagagtaacagaactgtgctgttttctgggattttgctttttactttttgttgttgttattgttgttattttgttttttgtttttttttaaatggagtgtgctggatgtctctacaattttgttcaaatgactgtaaaacctggaaaagctgttgctgctattgatgcataatatattgctattattggtctttcatataaatataaatataaacataaaattaaatataaatataaatatacacatataatttgaatttttggaaactttagctgtgctgtcaactttggaaaaaagtatcccagttggccatgttgaattggcatagtacagaaattaagagccatattggtctagaaatgctgaacttaatattttccatttgtacaggggtaacgcactgtattaaatatgtaaggtcttatctacatgggtttgattacaaaaactaataaagtattctctaaataaagataaataaataaataaaacttaaaaaaagttacttaggtcagaacaagatggggaacagctattaaaagtgagaagaaagcagctaatactaagtgatagccatcagttgcatgctacgaagctgtggatgccagggacttcaatacctccttctgaacactttgtaggaattgtttcataacctgtaagtctaagatcacaacccccatacatacagaatggcacagtatcaggttccctctcttagagtctctcctctagacagactgacactcatgccatcttatggtccctgtttgtggtctttcttaagaccagactgcaatctgctttaccatagaccctgcccacagccaggccaacagcagccatgtgatgggtggaacatctagagcacctgatgcccttgcacactgggctagactttaacctagcttttcaggcaatacctcccaatttagctggaattctgtgtgagcagcatggaaatgccctggtgccctacacacacaggcccagttaggtccgatttcctagaagaaacacaagtgaaatcccagctcttcctggtctttctcaaacatcagcacaggttttgattaactccgtttcttctaagggacactgtcactatagcatccaatttacaatccttctgcttcagactctcaggtactagaattatcagtgtgtggaaccacacctagctagctaattctcctcctcacaatgtaggtgagtctctgcctatcacatgtacacgagacttttaattctaaatcattgctgtccaattctctaagagtttattataagcatatttgtatttgctttctttaattggtttggttttcttggtttagggaatttggtttgcttttggtttttggataggtactcatttttaatgtaacatttccccttttattaaaaacagattcttttcttacacaatatatcctgattacagtttcctcttcttctactcatctcactacctcccacctccctcccttctggatacactccctttctatctctcactagaaaagaacaggcttctaagagatgacaacaaaacatgtcaaaataacatgtaataagataaagcaaaacccatcaatgttagacaaggccaaacaacagaaggaaaagagccccaagagaaggcacaggaatcagagacctactcctttccacactcaggagtcccataaaaacactaaaccaaaagaaaagccacaacatacagagaagaccatgtaggccctgtgtttgctgcttcagcctctgagttcatatgaacttttttctcagttaatttagagggtattgttcaccaggggtcctccagcccctccggctcttatgctcttcctgccttctcttcctcggggttctctgagctctgaggaaagggatttgatgggaacatcccatttagagctgtatgctgagaggtgtgtgtgtgtgtgtgtgtgtgtgtgtgtgtgtgtgtgtgtgtgtgttgtggaaatcagtatggtgactcctcaggaaaatgggaatcagtctactacaagatccagcaattccactcttaggcatacaccaaaaagaannnnnnnnnnnnnnnnnnnnnnnnnnnnnnnnnnnnnnnnnnnnnnnnnnnnngagaggtgtgtgtgtgtgtgtgtgtgtgtgtgtgtgtgtgtgtgtgtgtgtgtgtgtgtgtgtatgatgtctggctgtggtctctgtgcttgttcccatcttctgcagaaagatgcttctctgatggtggctgaactcggcactgatctatgagtgtagaagaatgttattagaagtcaatttattgttaccttttgttttgtttctttttataccagtagtatttggttttaccctaggtctctgagctaactagtccctggttcttgctcatgcatgcagtgtcaggtaagggatccacctcatggagtgttccttaagacaaatcagacattgactattccattgttccataagacaaatcagaatcagacctctcatgagctttgtgccaccattgtcctaggttttgtggctggagtagtggttacatttctcttttgatagactgcagcattggataggtactcttcattagaaaaagggagctgtattttcacagttaagagggcaagcactgcctttctttggagaaaatcattaggcctgagtagctgaggcactagaaacgtcactgtgggtgttggagttttccaacagctgtgtccacagtttatgacaagttttccaatgaagcagaaacccctgtttttatggtccctgtacctcctgatgttacccaagaacttcagctttgccagttcaaggagacaaagaaagcagaaaaagacactgaatagagagtctcctgacattgattccttccaagggccatggcagctctcactagactggaaacagggcagcagtggggatgtcagagcactattgttctgtggctgcagcatgtgaccttacctggctggaattattttctgctcttggctgtgggatttctggccagtcttatctttctgccttttcttttcaatacttaagtttcatgcaagtgtatgctgcatattgaccacatcccctccagaccattacccttgcttcatccaagcctcctcattgtctcttgatggtttttactgcataagcatacactaagtatatgtgtatgttaaataatgcattatttcaaagtcacccaagcactgctttagtttgagtacagttttctgcatacaccttccactagatttcagccatttggtgcctagggactggacgattgttcctacctactcatctgtgaaacataggaaccttagtgacaaagcccaggctgattacaaagcaaaacttcatacaataaaggatcaaatcagtggtttaaaatcccatgaaatatggagcaagggacacatttccattcttaggaattgattttagagctctaatctccagtctagacaatcagatagagcccagagtaacagcattggcagttagcagtggtttgatggtacctctcgtctctacttttaattgtatggacaagcacaagcaagtgacaatggggggtctcatttacaacatgaaccttggacttcatacatttaaaaaaggacaggtgcaaatgtcattcacctctgagttcttcactggagccttatgccagggcccaaaagccaactgcgaatcacatgggctcctttctactgtaactcccatgcaagaactttagcattaattttaaatgtaataggctgaaaatttgcaaatccaatttgctatgtgactacactctcttgttcccacaatcattacatttttacccagaaggacctagaatttaaatagttaattttgtgagcagtcaatatgctattccaccacaagatggcaatcaaacttcatttaccacacttagaaatggttcctttgctctgccagtgtctcaattgctccatctttcaatctttgtcaacaattaaggcttcaagatcatccatgcttccaaatgaagttcaaaccaaagctgtaaggtaaaattgccacaagaatatccatatttaagcttctgtcattttctgcaggctgtgaactttttgttttgttttcttttgttttagtgagggaagggggtgctctcagtatttaactgcaggtcttccgcctggggattctgagtgccctcaataactgtctcccccacaaagctgtgtctccttcacagatgcaacctcaggaaccaaggagtctgtccatgctttctagtgaagatgttaatatctcttatcttttctgttgcgttcttttttgtcctacttttccacactggaaagccaccatagacccagtatcaccttttgcagaggtgtgcatgacctctaaagactttccactgccttctccaggcaagagcattttggaattcaggacccaggaggatcttacaaacattagcgatgcctgctatggtatgaaaagatcccattacattttttcaatcatttcttccaaggagctatgttgaactccacaggttaagtgtgagccactattgccttatctctgggtagtgcatgttgtttcagttagggtttctggtgctgtgaagagacaccataaccacagcaacttttacaaagaaaacatttcattgagggggcttgcttatggcttcagaggttcagtccattatcgtcatgttagagagcatggaggtgagcaggtagacatggtcctggagctgagagtgctacatctaacaggcaacaggaagtcaactgaaagtcacactgagagaagcttgagcaaaagagacctcaaagccctgccttcctccctcccctcccccccccacacacttcctccaataaggccatgcctcctaatagtgccaccccttcactcccattgggttagggttacatatgtcctatattgtccagtctcatattctccttttctaatttcacagtctacattgtacccctcttcccacttctttacatatttataattaagaccttcacatagaaaagaatatggaatatttctgtttttgagtgtgggtcatcttacttgtctttcctacaaattttatgatttcctatttctttatcactgaataaaatcccatgtatctataaaccataatttcaaataaactgtctctttctgctgcaaaagaaagaaagaaaagaaaaatcatgatagagcaaaggcatgtaatagtctttgatataaaaataaaaagctacacatctcccatttcctccataacacacaatagaagtttaaaaaaaaaacaaaacaaaactagttactgaattgattagaaaagagggaggaattgtctaattgtgtttaggttccttgtgtctggagaagaagatgcactaatttttctgcttctctggctgtttttccttttcttccctttctttatctcttttctttcttttttttttgtaggcggtcgttcatagatatggaattaagaataaaaagctctctttttacccaaatcatgaactagaaattactgtttacaaggaaatacagctgttgttttgtagctgggcactgaggagattaaggcaagaggatcaagccaacctagggttcatgataaaactctatctgaaaaataaggttttgtggggctgtaaagaaggttcaggggttaagagcactggctgcccctacagaggaccaaccagagtttggttgccagcatgcacatggcagttccacgggatctgatgtccaattctggccttgttgggcattgcatgcacttgatgtacagatatacacatgcaaaacatccatcatacacataaaatatcaaaaatggatttttctctgaaaattttgttatagaattatgactacttattgatcatatttcacagtctgagataacacagaataaatcgactgatctcactttcaaattcataggataatgaaatggaactgttttcttttaaaaagtggcaaagagggatgaaaagatgtttgagaggttgagagcactgcctgctcttccagagaatccaggttcaattcccagcacccacatgacagctcatacctgtctgtaactccaagatcttacaccctcacacagacatacattcaggcaaaacaccaatgtactcaaaataaagataagcaaaatattttttaaatagtaacaaagaataggctggtgaaatggcccaagagattaaatacttgccatgcaagccagaccaacggagttacatcaccaggtaggaaagaaatgactccacaacttacttgtcttctgtaacacatacacacacacagagagagagagagagagagagagagagagagagagagagagagagagacatatacaaacatacacacacacacatgcacacacagagacacatatacaaacatacacacacatatgcacacacagacacatacaaaaactacatacacacacaaacacacatacacatgtataaacacatgcaaacacaccacacatacaaataaataaaaaagaaagaatgaaacagaaaatacatatcagcaagctgaattaggaagaaagaacagtttctagacaggggtgataaagaccattattattgcatgtttaaagtcccttgactttaatatcaaattatgagtagctttgaaatattttttctaagtaatttgtattgtttttttaaatcttttttattttttattttacatactagccccagttcccctccctccccttctcccttacccttcacctcccccatgctatccttggcagtccacaaagtctggcataccaagttaagacatgaccaagaccctccaccctgtatcaaggctaagcaaggtatcccaccacagggaatgggctccataaagccacttcatgttcatagtagtcagctgtctctgtggttttccccatcatggtcttgacactgctggcccccttgttcatatgatccatccaccctctcttcaactgaactccaggagctcagcccagtgcttggctgtgaatctctgtatctgattccatcagttactggatgtaggttctatgatgacaattagggcagtcattaatctaattaaaggggaaggccattcagagatcctctccactattgctaaggagccttacctggggtcatccttgtggattcctgagaatttctctagcaccaggtttctccctaaccccataatggctccctctatcaagatacctctttcattggcctccccctccaccccttcaccaactcagtcatcttgatccctcgtgttcccatcccccttttcctcccttctacctcccctcccagtttacccaggagacctcaactgttctcccttcctggggccctccatgtgtgtcccttttagggtccccctttttacctagcttctctggggctgcagatagcagccttgttatcctttgctttatatctaataaccacttatatgtaagtacatatagtatttgtctttctgtgtctggattaccacactcaggatgcgtttttctagttctgtctattttatctgcaaatttcaagatgtcattggtttgtaaagctgagttttactccatttcgaaaatgtaccacattttctttatccattctttggttgattgacatctaggttgtttccaggttctggctattacaagtaatgctgttatgaacattgttgaacaaatggtacactgaacctgatagaagagaaaataggaagtatcattgaactcattggcacaggagaccacttcctaaatataatactagtagtacagactctgagatccacaatcaataaataggacctcctgaaactgagatgtttctgtatggcaaaagatacagtcaataaaacaaaattgcagcctacaaattgggacaagctcttcaccagctccacgtctaacaggaggctgatctccaaaatatataaagaactcaagaaactagacaccaaaatatcaaataatccaatttaaaaatggggtgcagatctaaacagagaattatcaacagaagaaattcaaatggccaaaagacattcgaggaagtgctcaacatccttagtcatcagggaaatgcaactcaaaacgatgctgagataccatcttacacctgtcagaatcactaagatcaaaagaacaagggacagcttatactggagaggatatgaagtaagaacactcctccactgctggtgggagtgcaaactttgtacagccactttggaaatcagcatggtagtttcgcaggaaattgggaatcagtctactgcaaaacccagcaattccactcttgggcatatacccaaaggatgtacaatcataccacaaggacatactggtaattcttaaaagatctatgggattttcagtgagaataattgttctcgatttcagaaaagactaagtactcaacagaatgtttatttccccctactgttgtaagaaactgtcccttcaaagcagtggactacctggagagtcattcccaccatcccagcccatccctagacctggaaagactatcccccttgactattttctgccaatagtatgtacatagacagctgttgagaaaaggaatagagtgaggcctggagacttgcctcgtatatgcaaaatcctagattcaatcctcatttctggggtgggggaaagaagctactggatattcctcatattctcttttactatgtgttcacttcatgcagaagagtctgagatgaattgagatccacttaaaaatcacactttgggcaaatcttacaagagaaaaatgaactaactgtgctaagcttctaacatatttgtttcattactgcttactcaaacaggggaattaacatcttgaagtgcagtggtactgtgagaaaatcctattattagtgagcataaaattagaagaaatggacactccagaaataaccaccagatggtagcaggagggaagtgattttatcacaaatacattttcagaaacttggaaagtagaccatgtgcctagcaaaagtagtcctgagacaggaccattgtgaccctttggggtacatggcagtaccaggagcactgtttgtttggttataactgcagaagagatctggtggttagcagggctcagagatgttggtaggagtccaacagcacacagcatcaccttccacaactagctggactactactgaggttaaaaaggtctatataggggttggagcaatggctcagtgggcaagcatgaggacccaagttcaagtatggtaacctgcacctatagtcccattgctaggagacagaacagaaggatcccagggcctcactggccagctggactacaagaaatggcaagtttcaagtttagggagagacactgtctcaaaatatgtaaggtgatagaagccatcccatttttaacctctggtttccacaatcacaggtacagaagtgtgtaacacacacacacacacacacacacacacacacacacacacacacacacacacacacacacacacggaagttctgctctagagaaagtaactggaaagaggcagaaaagtaatgttggctgttcttcccgtatttggcaaatgtttgaagaaaggaaagagatgaactcagcaaaaagctacaagcagaagtaatagggctgaaaaatgtgtcagatatttgggggcttttacaggtctcataaataacgctctaaaggccagcaggaggaaggaaatctgattcagttaaacaagctaagaccacactacgaatttttttttcattctccaagtatttttttgcctcctggacactaagcaactgtccatggaagtactgcaagactcagatgtcatcaaggacaactccattgttcatttcacccttctagcagaataacctcctgtctcttatatcggaattagtcttccaattgtaccccttcagtatgtaagattttgttctccattgtttcccctttgctgtaaatcttctgaatacagatagtgtcaattacacaccacatatcctacagcataccttacacatagggtacaatagtttctagacaattctatgctcaataacataatattccataaagcactgatccatggtgtttgatctttggatgtccatagtccagtattgagagacaaaagaaaaaaataactccatgaaattcttttttttttttagattttttatttgaaacagaaacaagattgttttacacatcgatcccagttccctctccctcccctcctcccctaccaccttccccccaactaaaaccctacctatcacattttctttctgctctccagggagggtaaaacttccataggggatcatcagagtctgtcatatcctttgggacagggcctaggcccacccctgtgtgtcttggctcagggagtatccctctatgtggaatgggctcccaaagactacacttatgctagggataagtactgatctactacaggaagtcccatagatttccaaggtttcctcactgaaacagaccccatgttcctggggtctgcatcagtcccatgctggtattccagttatcagtctggggagctgatgttcaggtcagctgtttctgtgggtttcaccagcctggtctagacccctgtgttcttcactcgtccttctctgcatctgggttccagttcagttcgttggttagttgtgggtgtctgcttctactttcaccagctgctggatgaaggctataggatggcatataagacagtcatcaatctcattatcaggggagggcatttaaggtagcctctcctctgttgctttgattgttagtcggtgtcatctttgtagctctccagacatttccctagtgcctgatttctctttaaacctataatggctccctctattttagtagctcctttcttcttttcttctattcttcccctgactcaaccttactgctccctcatgtcctctgcatccctcctcttctccccttctcattctcctagctccctcccccacctcccatgttcccaattttctcaggagatcatgtccctttccacttctccaggggaccatgtatgtctctcttagggtcctccttgtgtactagcttctctggcagtgtagattgtagactggtatcctttactctatgtctaaaatccacatatgagtgagtacaaacaagcagggggtagcaattctaatatccaacaaattggactttaaactaaaatcaatcaaaggagatgaaggagatcacttcctactcatcacaggagaaatccatcatgatgaagtctcaattcttaacatgtattccccaaatacaatggcatccatgttcataaaagaaacattactaaaactcaaatcacacataaaaccgcacacacttaatagtgggagacttcaacactccactctcaccactggacaggaacaccaggcagaaacttaacaaagaaacaaaagaactaattgagaagttatggcccaatgggcttcacaggcatctatagaacattccatccaaatacaaaagaatataccttcttcccagagccacacagaaccttctttaaaattgaccacataattggcaacatagcaaacctcaacaggtacaagaaaactaaaactccatgaaattcttaagtctctggcctacaaataattctcacactgggagtcaaggaggaagtaagtgccttctcccaacttctaattgcatgtggctgtgtgaacctaagaactgtggaacacaacactgcttttaaaaaggctgacataagtacatctctaaggagtataattggtcctaaaagtgtgaggttttgatcttttaaggaggttaggggttgaaaagtgaactaaatattgggattcaagtagcaccaagactcctacttctcagctgaaggtatacatctgaacttttgaagatggagtgactgggtcatgtagaaacatgaaattacccaggagcaaaaaccaatatcccaaagcagagggtatacagaatggaaaccattcaagaagtgaataagcaaaatctgattttctttacataatggatttccactatgtaaacaaagtcagctattttatgggggacaaaatggattatcctttcaaatgtgttgcttttccaccctgattttatgattcttaaataacagcctttctgaatatatatgtattttgaaaaactttttgctatttttatgtatgtgcttgtgcctgcttgagtttctgtgcattgtgtgcatgcaggaacctgcagaggtcaaaagacatgactgggtcccctacaactgttgttggaggcacttgtgagtcaccatgtgcatctaggaagaaacccaggtcctctacaacagcagtaagttctcttaacagatgagtcatctctccagcctctattacactcttaaatcccaaacacctgccacttttgtgcatatattcaatacatttttattcactagatttaagtacaaagaattctatttttctcactaccactctccctgttccccatgaagctcaaatctttcagaaaaagtaactcatttctcaaaattaatccatcttccttgaatttctggccatgagtcatataagaagctctgtgctgcacactttctaggagtacttagtcaacatgtatcaacagaaagagactcaaaagacaggacaaaatgtctatggctatctttaataggccatcaaatagtcttgattaaggtaatgtgaacaagaatcgggaactaagaactcatagctttgagggcagatgtagtggtcaaacaacttttaaaaccatctatcaaatggggccaactagtgatcaaaggcatttaacttggccctgaatcaaaattccctataggaccacgcaacacaacacaaaccagaaaccccagatctggcatgctgaaatgcacacactgtaaagtgcagatccccgtatgccacactcccttgtacactcccttatttccctttagctgcatcctccactcttcccccatattgtcttacttggagattacctctttgttctgtttggatgttagtgcatccatccatgctaataagcttgcagcaatgtgtcaagatgatttgcatgaattataagtgaaattctgtcagtaccatcactgacacccacattcagggggtctggatcagtcctatgctggtttcccagctatcagtctgtaaccaagagctctcccttgttcaggtcagctgtttctgtggatttcaccagcctggtctagacccctttgctcatcagtcctccttctctgcaactggatttcaggtcagttcaaggtttagctgtgggtgtctgcttttacttccaccagctactggatgaagactataggatggcatataagtcagtcatcaatctcattatcaggggagggcatttaaggtagcctctcctctgttgcttagattgttagtcggtgccatctttgtagctctccagacatttccctagtgcctgatttctctttaaacctataatgtctccctttattatattatctcttatatttctctcttctgttcttcccccaactcaacctccctgccccatcatgtcttcctcacccctcctcttctccccctctcattctcctagatccctctcccctcccctcatgctcctaatttgctcaggagatcatgtccctttccccttctccaggggaccatgtatgtcttagggtcctccttgtttattagcttctctggcagtgtgtctaaaatccacatatgagtgagtacatactatgtttgtcttttttgtgactgggttacctcactcagaatggtttcttgttgttccatccatttgcctgcgaatttcaagattccgttttgtttgtttgtttgttttttgttttttccctctctgagtagtactccattgtgaaccacattttctctatccattcttcggttgcttccagtttctggctattacaaataatgctgctatgaacatcgctgaacagatgtccttgttgtatgaatgtgtttcttttaggtatatgcctaagagtggaattgctggcatgtagaagactgcagagagatccatgtctatcgacatgcacaaaacttaagtccaaatggatccatatgataattatcacaacaaaattttaggcatagctacatagaaaaacactagcaaagcagtgacctttgcagtaagaatgagttctattggctgacaaaaatagctcagagttagtgcctacaggatgtaataagcataagaatagatcctatctatagaggatgcaatatgcatggggtttctttcataaggatgggctctattcactgagagacaaagttcaggaatagggcttaaacaatgctcaggtgtcaggtggaggctgcctcctcatagaatagcaaaggataaaccaggttgtttgaccactttcactctggcattgcagatgagcagatatcagtggcaatccaagtttctctaatgcctacttaaagctgggcttccttcagtaatgattctcagtatttctagcctagcaagacttctatgttgatattatgactctaagtcctgtgaacttaaaagaaatctatacaaaaactgttcattttgccaatactgatgtcacttaacattgtgacctggaaaccaaaaggcagaccttcaaatgctgtgactgatggaaaaaggtactacagaatagagaggaaggcaatatttttttttttaaagaataaaggaaagggcaatggttaccaccaatgcactggcaaacaaataaaaattcacatatatgtggcaagtgatagagggatgttaggacagacaaccaggctgaccccaccccctgacaaagggcatggcacgcacagggactgctacgccatcaccacgtcacttgtcacacattaagaccctgtgaggactctgtgcatgcatgggacctcagtgcacatgagcggtcttccctttaaaagttctaacttctctgcttccctctccctctctggcaatcgaccatggaggtcagccattaactctgttcctctcctctgttactctatttctctcttgctcgctctcccgtgatacaataaactatcgttaatgtatctcttgttctcatgtctcattctgtaccttttttcttataatttaagcaaaagaacaagggaggctgtaaataataaatactgaagactgagaaagagtaagaatttcatctaaactgactaggtaataaaattatataggcctttagagtcaaacacctgagcttaaatgcttacctgaactaagtaagaataagaaacagccataagaattcccatctaattattaattaactaaataataaaagtccacaacttagaacacaaacaatactcaagaattggttaactgatgaaattaagcattttggaccaatacagaactgctagcttacagttcaaaaatttcagagaaaaaataactaaccaaagatgaccagtttcctagtctagagatagtcacaagattcaaggacatgtgaaccagtcaaggacacagtgaaccttttactaggtgtttaaaagcaaacagctcaacagtaaggatgatttgaccactaggtggcaatgatacagctgcatttcacatgaaaaaagtaaatccaggaaaaacaatcaagaggctttctagtgtatattttcattttataaaaagtgttttatatgcaatttaactaataatttttatctaattcaatattcatgttgacttctagtgctttttttccccactaggcactcagaattaatacaacacaatttaaaagacttttatcataaattagtactttgaaaaatctacacacacacacatatcaaagataacagatattatgggatgattaaaaatcttcttaaaagttttagaagataaccaatgttaaacgttaataaccaatgttaaatgttaaataacccaagataaccaatgttaaaagcaaaatattcaaaactcttagaacaaattacaggactcttttttgtgccaaaacaattatctctagcacttcctagctatttgtgctttcttcaaaaaacagaatacaaacatgatttatctaaaataaaaaactttattttttcacatgaaataaaatcagccaagtatgacaaattttcaagttatagatatttctaaatattcagtaaaaaaattaaattgcaaatttcatgtttcccaaatattagtgggagttcacattgcatgtaataattaaaaacatttatgaaaaattaggtaaataaataattctatagttatccaactcaaaattttaaaaaatcctttttttctttgtataaataaacctaatgcttcccaaatttttaacagtttcctccaaataaacagatcaaaatatccctcataaatcagctttccagtttctctcatttaataattactttctacatataaatcatttccagaattatatttccacccacaaaaatgtaagaaaacagaaatatgattctaagctatttcatagattacttccaccatcattattgaacttcattttaaaattaacatttaccatcctggtcatttaattctcagcctatacaaatacaaaaaccagataaccacttaagatggttagcacaagattgctattgcagccctcaatgcaagcaaaagaatttaggaaagtgctcactgcatctattttttaaagctagatatgccattagatcactgatttacagaagcaaatacataagtatgtcttacttatatctaagtagcagtagctctgtttttacaaataaggggataagacacataatcctcaaaccacttcagttacatttttatatgtatttcataggactaagtttgacaaagtagaacactaagaaaatttagctacatctcaaagtgtcacacagatacaattataacaatgataagattcaaatgctgctattgacttgggtttgtcatcttctgtttatttctgatggtggctctaagttttcgtactaccagtctgtcaggtagaatcatatcaccttgttgttctagataatctaacaaattctcagtccattggagagcagctgcatgatttatatgtttctctggaatcagttcaattccttcctcatcgttttcactggattcatctgtctggccttgggcccttctgataatttcactgtcagttaatacttcgtaacctggctcagtactgtcaatctcaagccacttctccatattttcaggagtcacattttccagtcctttggtatgctgtaaaatggtggccacagtagccccagaaatatcttcttcatcaaagtccaaaccttctttttcctctatggaaggaagaatctgtttccaagctctgctaatggtaaccggctttactaagttccatgccattgctatttcataaagtgcatccaacaaagtcagctttttccagaatgatttcaggtcattaccttcttccaaattgttctgcagaagacctgcgcgatagtttcttttcatagttgctatgactccctgatccaaaggctgaatcgatgaggctatatttggtggtaaacattttgcaaatatttggccatcatctgacctcaggacattttcatttggatgtgctggggaattatccagcaagagcacagctttttcctgcaagcctttagatcttaagtactctcgaacctgaggcacaaaaatcttatcgaaccattgccggaaaatggagagatccatccaagcacctttttggctaaaataagagacaggcaggtttaaggtatcagtcgacttgaaggatcgaggtttcttcgctttgcccacaacgcaaagtttaagtttgtgtaagcctgttgcattggtacaacacataacagtgactctttcttcaaacgagttgtgcccaggaacagtgcgtttacctttaattaccgaagtcctggaaggtaggcacttccaaaacagtccagtctcatctgcattgtagatctgttctggctgcaaattctcccgttcgataaaatctctaaaattcttacaaaaatcttccacagctctatcatctccacttaatctttcatttctaatgttaatctctctaatgctgtgccgctgtttaaagcgggttaaccaaccagcagaagggttaaaatcaccatccattcccaaagcgtagaaaaagaactctgcccgtttggcacaaatggatccagatacgggattccctttggctcgctgctgattgaaccactctaacattgctctgtctagttcctcgtacatggatggcttcatagattttctcttagctaggagacttgtagaatcggagctgcttgcgtaagttataatcttctccttgttttttcttatatccctaactgttgtttcaccaatcccatatatcaccgccaactgcttggaagagcctccatcttcgagtttctttattatatcaagtttatctttgatagtcaataccacacgcttccgcttccctgacatggtgggaggctggcacctgctcgctcgctcgctggctcgcactgtggcgatccctaagaatccttacgtgactcaacggtgtggagcactcgacctgtctcagcctccgaagcaaagggcggggaggaggtgacaggaagtgtgcgggggcaggcctttggcaggggtgaggcccacactcagtctgagtacttgggactcgcgcggccccggctctcgcccgagcccgggccccggtgcaggccctgcattaaggccgccacaccccaaggttagcgcacagcggagcggaaggaaggaagggagggaggaggggaggaagccgggcgtgcgagcactgccctcctcgggggtctcagaccctagtctgtgcgagcacagccctcctcggtgacccctcggaccccgcctgtgcgagcacagccttcctcaggggtctcctcagaccctattctgtgggagcacagccctcctcagtgaaccctctgaccccgcccccacctgtttcaaccccccctcagaccctagtctgtgcgagcacagccctcctcggtgacccctcggaccccgcctgtgcgagcacagccttccatgggtgtctcctcagacccttatgtggctgtacacagctcctcctgggagtttttcggcacacccctatctgagtgcacattcctttttcaatgtccttgtctctccagaccgttatctgtggatgcacacaacccttgtgcagtcttagtgaagctgggtcagaggttcctgtcttctatcaacagccatccctcctttttggaggcctgagcaccctcttcctgtttctggggaatgagttcctccagaaagccaggttggtaatcatgaatgtgaccatagtgttcacaccccaaatgatcttttcccaaactttcattcggtatgctgtaaaatggtggcnnnnnnnnnngggagccacagcccctgtcacagatgctaatgagtgatctaggctgacaggacccactctctgagaatatgaagtatttttgagctatggtgtcaaatgggaggcattggcttgtctcttaatacctttaattcatcatttcctgttttctgtcatgttatgctgccctcttttccagccaatgggaggattatgatagattgactcaaaccaatgtgacaaaaacttaagcaaaataatgcatgcagcccttaaatcctttattgtgctgatttggtttccatatccctagtaattttgttaagattgtgagctccttgggagcaggggcttcatttatttcttctagtagcatcactgctccaaaacatgtgctggcattttgataaatgttcaataactattactttggtttttaatatttgctctccaaactaccatgtaaaagaaaacataaaagagggttgatattctacaaattttatgaattaatccctcctggcagaatttccaaaagtagcatagtgtttgcacttcaaatcagagataagtaactatcatctacccacattgtttgtagagtaagtaggtgacttcattgtgagatatttcttgagtatgaattaacctcaaattctaaaagaaaatatttcttctgattgattcaagtggcattaacaccgtaccttcttttacctgtaaagttactttgagagagaacacatgcaaatatgaattatctttaaatcacatcctttggcagacatcaaagttaatatatgcatctcacatgataaccatgaaacacatgatagtattgacctgcattcacttatttgatgctttctggtcaagtccttgtttttctctttgtctgaaggtaagatatcttgataaaattctcatttgaattttttaatccagcataaacaaaaaaactcatacccatttgcatggattcttttgtaggtgaattctaaacatggaaatgtcttacccatgaacttggcttcatttttctcatttttcttccctgggtcactcacctttttcctctgacattcttccctccccagataatttagtaaagctatccatgatttacaaagagctaacattcaaaaatgtcctttttgctaacagttttttttttttaaccatgttgatagcaatgacaaaaagacagaagccctggaaaatgtgcagtttgccaaatgaaacttagtttaaataaaatacaccttctaaaaaggttcaagtcttcatttttccatagagatttttgctttggaccttaaattttgtggttgatgtcatcaataaaatggtagagggaagtctgcagctttccatctcttgaacatttttttcctgcctaatggatacttttcaaaaacttctgacttaacccatgtgcacttaaattcagtttcatagttttagaaaagcatgcttgttaattctcaccattttgatgattgttttctgaaattaaaatttagcatgactaagaaataaaatattactttgaagtgttaattttcactatgtgtacacacatgatactaccagcagtcattgtgtagcactggacgggatcaggaggcctggtttctaaccctgctctgtcactagcaagctctgtgatctttggtaagtcttttaacctctatgtacttggctttaatatttgtatttgaagataaatagtatcttctttcgaatatcattgtcaggatttaaaaataaagatgaaaatatactgaccaactttaaatataggtgatttgtccatctataccttcattgtgtgcagtcatgtgtcttcttaatagtatgatagtcttaatcatttctgttcttgtcctagaaaccacccattgtagttttataagaacaatctggtgtatgtgaatctgccttgtgtactaaaataaaatcatctttcaccttaacatttcttactgtccatatttacttcatgtatctattgaaaccatgtttgtcttttgaagtgtttttcattatttctcccaattcaaacaagttgattgtgtaatgtacatatgcaaaattggcttatgaaaatttatatgtctttacaaatactttactatacctaagctgcctagttattctagtgtttaacaaaaatattttcaaaactattggagaaattaggtagacatattgtaaagcagtgaagtatgcaaaaggtatgctttgaagaataatctagggtttttaaagtaattttcattacataccttattttttttttacttttgttggtttcaatataactcacatagattataacctactatcatatagaccatttggtgtactattggtatttaatactatcactgttacattggtattatcctgtagcagatactatcaaaaattatactttggcttatgctatgcaggtcatttttggtgaataatcttataatttctgctgttctgattttatatgagaagctaccattatatggaggtgtactgccttaataaccataccagaattagtacagttaacatagtcttttctcttccaaataataatatttggaacactataaagttggtccagtaatgccaacattgcttaattattttggctttgtaattttgatgctacctttacagttaggtacacatttttttttttttttagtattttcaatgattgttaatcttataaagactttttttttctctaagcttctaataatcccttaaaagtgagacagatgaagtggatgtttgaagctaatgtttggaatataaaaaataagcagtgtgattattttcataatcttggattattttgtttgtaaggttctatttttgttttatctgttgatactactatatgtaaaaaaccaggaatattgtgtgctattgtagaatattgttataataattttcataagcttttacacatatactatgaggtcatattaccttatgattcttctgttccttggcaaccacagaagtacatatgtgttactaaatttctagttatcatacctatctcacctaaactatattacctagtttaatacatgcttgtgataaatttagtgaaatatactttataaaatcacaaactgacagctttggtttttcttccttgtactatatgctctgctttgccatgaaacttttcttacctttttcatttgactacattatggacttttagtaagttttgttggattggtctgtattttttaagtgtagtataacaccatttccactttacaaaggaatatagaggctacagtcttagaagataggttctttccatgttgtattgtcatctcttttatatcaattaccacattgtaactttgttcatgtaacttgatcgagcctttaaatttcatgttatttctgttccaaatcaaatcctactttgcctgaggatgagtcctctttgtaattcagtgtatgtgtgtgttgaacacatgtatgcagtgtatgtgagtttgcttgtcagtgcaggtgtttgtggacaccagggatggacgtagagctagcttgcttgtttctcacattattagtattattgtcatattattattattattattattattattattattattattattataaacaagatttctcatgaaacccagaggtagtcatttcagttggactaacaggtcaaggagccacccctgagattcccctatatctgtcctgttccacatccgttgctgactttgctgtgtactgcaccagccagtttttaatgtggatgacgaggatgccaatccagtgcctcatgctttcatggcagtcaatttatccactaagccacctcccagccctgtctttgtaatcccatcattattttctattcttgtctccctttttttcctgccagaagctatttatccctttttagtaacacttctttactaagtataacatgttccttatcagtgccagagtttgccctactatgtttacttatctgaaattactttttctttcattattttttttctaatctaaccagtccttgaaaattgtgcctaagcaactttgctactgatggtctttggtgaactaattgacttattaatttgtctacatcttgacatttctatcacatttatttttattactcattaatactgaccaccttgaatttttttattatatttgcatgtttaagttttatacagttttctaaaggatgcaggaccataacttttctgtgtattcttttcagcacaacatatagcataattaaaatgtgttcaaaaataaatagtagttcaatgggttattggtacgttgactgttctgtgattttttttacacaaatatctcatgtgatttgcctttgtgaactatttaatgaagccaaattaatgtgtgctatgtattcattgctgtaatctggttgtcattgttacgttcctaataactttattttgtagaagcttaagtgaaaatggtacatgttagaagacacgaaacaaggaaaaattctaaaactcaagtacctgagcaaaaatctcgagttgattggcgtcgaactaaaagaagtatctcacagttatttgatagtgatgaagaacttgatagtgatgaggaacttgaagttgatagtgatgaagagcttgagagtggtgaaagtgttgatagtggtgaagagcttgatagtagcaagaatcctggtattagtgaaataccagaaaaggaaacagagcctaaattaatcaaagttgaaactgagggaagcaacagtaaacctcttacaaacaccagcaatagttcaacagatgaagaaaaaatgaacaaaactgaacatgatttaccagacgatgaaaatcgtccatcaggtcaagagaagggtgatgtcaacaggcataccaaacaaagcgtagaggaggatatggaagatgaatacatcaagcctggaaaaagaaaaaggctgtcttctgtaatgtatgacagtgatgacagtgatgacagcgatatcctagttagaaaagtaagtgctaaacgtccacgcagggtggtcgaagatgaatgttcttctttggaaacagaacaagaaacccctgaaaaatcattagctgctcgaaagcgagaacatcaccagaagctaaaggaactctcagaaagatcacgccagagacaaagacgcaatagtggtagaaattttgaggtgtgttttattttgttggtttattgttgttaaatttttacttgaaggtagcttttataaatactaaagtaccgagtctattctatttccaataagttagaatttttaaataggcatctttgactcttgtattattttatttaataataataatttattgtgcacctcactctgtcttttaaaaacattgaaagactatttgttgttctgtatggtctttcccattcttaattacttatattttaatgtttattttaaacattttacatcacataaccaaagtctatgcttcttcaatttcaaaagttcaatagttagccttaaaatatgtgtttaagtatgtgaattgatttttttgccttcagatttaattttatagccatatgggcttgttaaaaggcataatatttactgaagcatttattttcatttaattaggactctgaaaaggaatcttgttcaagtactgatgaagatgaggatgaggacgattacaaatatgatgaaaatggagatgattatatgattgatgattttgtagtacaagatgaggaaggtgatgaagagaataaaaatcaacaaggagaaaatttgactacatcacaactgaaattagtaaaacagaattctctttgtaagttaaatatagacagttgtttgtatcttgttcgaatcattacataaagcattaaagcctattaatatcatcttctaaacattggtaaagaacgatggttttatgttaatgtattttaaattttaacaataagagattattccactggttttaataattcatttcccttataaattcaatggaccccagccaacaagcatttattttcatcaggctaacttttgtcagtatttaccactataaatacaattgaaaacacatttattaattaaaataacattagaaaacttattgataaaaacattttatagaaaataactattttccaaaacagaagactggcattattctaagttctttgaaatcactttgaagatgcattttttaatttatatgttttgtatgtgtacctgtgtgagtttatatgcatgatatgcatatatgcaggtgtccacagatgcaggagggcattggattccctggaactagatttaaagggagttgtaaacctcctgatgtggttactgggaactggactgagtcctgtgcaagagcaataagcactgttaaccacttagccatctctcctgccccattagatctctttaatgtgatcttaccaaagggcagctggattcttatatctgagttgctttcagtctgctgtaatatgctgttttgttgaagtgcatgaaacagtttgcctcactctgataaataactggaaaagggaaaaacattttcatagtagttccaaaataattgtggatattctcatcagatagtgttaatacacaaaaatccaacaggtgatactttcctgaaggttagttgtaatgtggaaactgcaaccatataaatgaacttttatatagatactccatatcttcacatgtatcatcatgatttttattaatatctcttgatatcatcagaatatttatcagaatattcctataatattgagaagttgtcatatgcacagttactgcatataagtttttcagaagtatgtttttttttttaacttaaaaagttggcttatcaacaaaagcagcaagttatacttaaggtgacaggatcacattgttctgtcttgagaaaacatttgatgaatattattgaatatctagtttgtcatttttctttcatgtgaaaatgatttcatgacaaatgaagctttgccccagttataacagttgcatgagtgattttccctctattttgctatgcagtataagtttattctatagagtactaaaaaacttgcttattaaactggagattaatgatagtaattatttttactatttcattgagggtattcctaagtaagaggatagtttttatcatcagtgcttcactgtggtgactgccatcatttttgtctggtactagtgctatttgtgaaggggcagctgttttgccaattgtacttttgtactatcagtaagatgtcagaaaaatatagtgttttagtattgataattgcatggatcttgctaatatccttaatagatgaggacagtatacttactctaaaaccacaggtttttatcaagctttttgaatcttcacacaaagagtgaagcctaccaaaattaggaaatttccgtgtgtgtgtgtgtgtgtgtgtgtgtgtgtgtgtgtgtgtgtgtgtgtaattaatatgcttttaaataagagaatttgaaaagttggaatacatctaaatatatatatcactacttaggtacctatgattttacataaattcaagtattgtttttgtgatgttttacagttcatagaaacaggttcatttattcgagagttcattcttcctaaatattattttaggaaagtcatatttactaaaattagctatagcagtttgacttgtatcccataatttgtaatgaaacaggtctaagaatcattcatatttcaagaaacttggcaaattaaggaagaaaatgaggcattttcaagttaatctctaactttcttatcaacaggtactactagttcacttgccacttgggcatttgcattaaacaaatacttaagagacaaaccatcatgatggattctttatctatactgtgttagattatgtgcaaaaccagtatgagtaaagtacatctaattccttctctgcctactccgtgtactccctcacccacacagtttctctgtttttgacttcttacactagtgtgaaacctttgttacaattgatgagcctatcttaatacattatcattaattcatagttcacattagagctctctcttatacctcccaagcattttgacaactgtctaatggcatacccatcagaatagttccagtgtcctaaactgtccttatctgttactttttttaatgttctccacagacttgtgtatttgaatacttatttactggtagtggcactgtttgggggagctgtgaaaactttagatggtgggacatgttggaagaagtgagtttccaaggaccagaccttagaaattacagctcaaaccctgcttctggctaaatgtcacccacttgcttgcttgttctcattttcccttcactgcttcaccgtgatgtaaaaagcctcatgcctttgctgatgcaactataagctgttcttgatgccatggtctgtaccctgtaacagtcagacaaagtaaatctttctttccttaggttatttcttgtcaggtatttaatgatagcaatgtgaaaagtagtaaatgtacatttccaccttttcttcctagaacattaggaaatcattgatttattttttgtctccatagtttaaacatttccagaatgtcacataattaagaacaccacagcatgtaacttttcctatggtttcttcatttaactgtggatcttgtgtttcaccccatgacaaaaccagataccatagctcacttactttcattgctgagtaaaaatgcattgtgtggatttgctacagtttatgcactcacctgttgcaaaacatctttattgattccatgtttttggcaattatgaataaaactaatataaacatttgtgttcagaattttctgtgggcataagactctctctcacttgaataaattccagagatctctgggtttacttttaatattaaatatctctatctcaaggctttgtatttcactttctatgtaatctattttattttgtatgttctgtagttgtagtagtctttctcaacaagttgtgtttcttaactggtaacagtattcttgttcttccttccttgagttgacatgtcctatgagccactattctaactctttttattcctgtttgctgtagaaacatgggctctgggtaacctgtgttcactaacatattcttcatttcttctgttaacccagtattgctttgtgctttgctgccactggccactattagttcttgaatgtttctcttttgtagcttctgctctaccactctctcctgcctttcctaattttgcactaatctcccatttgccattcagcttttgtatatcccagtgtttcatcatcaactgccttcatttagcttgtacttggggcagtttcccattactttaacccagtatatagacaaaaaattccccaaaatttaactccaggcaagatttctcctgagtataaggtgcaaattttcatcaacgtggtgggcatgtttaatctgagtatcttttagacatctctagctcaataagtagaaaacccgagtaagagatattgtcaaggagttgagatagtagatcaactgtttttaaggatggttatataatttcatacatttatcagaactggacatcagaaataatttttagtatataagaagtaaagcccaatgaaataagtatctgacttctagaagaaaaggttggatggttggctatgttctgtctttgttataatcctactcatttgtgtgtgtgtgtgtgtgtgtgtgtgtgtgtgtgtgtgtgtgtgtgtgtgtgtgtttgtgtgtgtgtgttttcatttctttttatttcatttaagataggaacttacactgtcacctagtgtggcctggaactgtgttgcccgtcctgatttcaaattaatattaatcaccctgtcttcactctgaaaagttccaaggattgcagtcttaggctaccactcccagttcttaagtcttcgtggcatttttataggagtacattgttagttgggtgggtgactaaaatatagtgtcagaatattcctggatcttatggatggagataaatgctaatcatgagtagagtttttgtatatatcagagctaataaaacaaaaatttagagtttaaatgtgtgattaattagtacttttggcttatcaattttatgtacaatgcagttaacaaaatttaagcaatttttgattagtcaaggaaataagttctaaaggttgctgtaagttaattcttataaattcaaaacatttttttctcattaaggcaatagcctatatgatgaacagtgaataccactctgtgactcatgttaaattataactgaagtggcattcccacattcattctgccaacttctacaagaattcatactaagtgcaactcaagagaagcttctcctaactctatattcagtgtacggttgaaaaacaaaattggccatcagtggtagcacacgcctataatcccgcactagaagggagaggccgatgggtctgtgagttcaagggaagcatgggctatacaggaatttccagttcagccaaggctacacagttagatcttatctcaaaaacaaatgggtgtgggtttcaactcattaaagactagggaagacatttgtcatttctcatcacaagccattggccaagagttacatgtatgccacttcaggactagtttcctccttcatgactgaaacatgacagttaagtcttcctctattttcatcagccctgtaaatatctgtttatattctgagttcacagttcttctgatagatatggaaggtggttgaaggtcacatatcagacttgcatagttcacatgccagaaatactgtacacaggtggaagaaacaggaaaacactgttaggcagacagtaagaattgcattcgtcctttagcactctatcctatcatatgttcagacaaaactgagtagtaaaagtgaaaagaatacatttcagccaaccactgtgtcattagaaaactggacattagaccaagaaaataaacaacttagttgccagctagcaattcagataattctataagtgcaacaaaaagtaagcctaaaagaaatatttgtttggattcaatgtgcatgtttttaaatgtatgggttttttaaattactaataggatcatttgttctttatgtgaccattttcaagtgagaaccaccatttataatgaaacactagatgtgttctttatgaaatgaagaggacagaaaattttcctatttcaggtgtacttgagcagttcattaagatgtaagaacaaactaaatagaactatagatggtctctgattaacagtggtgtgtttgtgcatgtgtgatggggctggaagcagagctttaatttcaatccccagcccagatgaggtgtccttaaggaattttcacgttattccactttctgttactgtttctccttgaatgcagtcaacacttgctgtatactttgctctgtcaaagcacgtcagagactacagagaagatagataaaccttgagtgggctgatgctcagctaacctcaattttcactttggccttcacagggatgatctgactcatttattttggttttagaagaaaaaaaaacaatttaaactgcactagctcaattatccatgttggaaaaaaatattttctgcttaggataagtttcttgtgaggtaggtaaaagagaatcagtattgaaaaagacatttgcacctaggatgatgacatgtatatatgtgtgtatataagcataatggctatgtttctaatttaaccacatatatagaattaagagaaataatatgaatattttaagagcaggagtgtatgttgagtttctttccgtagttttctacatatattctgtcttccctgagtgtgtgcagggatagagaggaactgttaaaaaggaaaattttcctactctacctctacctctcatgctatatgtatgctttcatttcataagacaacatatcagctagccattcacttctttctgggggagtatttataaattttctcttggtttggatgcgaaagcagaaataatgtcatcagaactccttaacaatacccatctccagctctgtggtgtcttgggaggctcatcttccaacatatccacgagaagctattttgaaattagtaaaggatctcagtaaagtagccaaaataatagtggatatacaaagctcaattagtttcttctatactagaaataaatacttaaaggatataattaatgaaaattccttctacaccaccaacaaaataaagtcctaaacccaattttaaaattatggcaggctttgtaggaaaagaaaaacaaaacaaaacaaaaaaaaacccaaaccccttacaatgaaataagaaaggaaacatgagcatgatctgaaagtactctacacaccacaagaagtctttcttctgcagttgaattaaaagaacaaatgcaaaagaataaagtgaattttgaaaaagtagtaattgaacaatttctcattcagttgaaataagtaaatcagggcagagctgacatgagaaaaacatcaagatcaataggaaggatgttgaagcaaaatgtcagcatatatccagctaaaagatgcaggaaatagcagaatacttagatagtaaatggaacatggaggaattgcttggtatcttagaaaaataaaatcatacataataacaaatctgacttctttatctttttctggattgaaatgatcataaagtgcatgcatagcatgcaggagaccctaagtacaaacctcagtattgctaaacaagagatgatcatggggagaaatttttaagtaaatcttcaagaatattctactgacattcatccaatataggtattagaactagtcctgaaggaagcctgggctccaaacctagttccaagcctctgttctgtttacttgtaatctttgagatctttgtcactgagagttgtcatttttccttctaggtcagaaatttgaattttatattctccaattctcaatccagttctgtgtttgaaagataatgccaaatctaccacctatgcaagggacacgaatacaaagtctggaggaggagactgcctggtactagcctccagctatatgattttaagaacccttctcatcatctcttcttttcagtttcctcaactaaaattataccaagggcaacacctccttgattagccctctagaaataggcagtgcacataaatgcttcaggcgatgactggtattttcttcctcagttttgttatctttcagttggaaatactaggaacattatcccagcactgtccaccatttactcaaatatgatgaaaccagtgtctcctttgtaaggagattctgatgcacatggctaggaagaatatcctgtggttaggaagtcacccaagcaatgctgatctctgtcctttcctccagctcctgaaggggaacttccagatcctttgaaatagagctgtagctcttaaaattccgtggcagaggagtaacactgggcattagcacattgaagtgaggttaaaaaaaactctgttgcatttgcttgatggttaaacttagtcccaaagtgattgagtttaactttctttccccacaagtctgtaaataatttttaactcagaattatataccaactttcttttacaacagtgttgaaaaatctagtcacaggtgaattcttttgaagtattactgtactttactttcccattaggtgtgtgtgtgtgtgtgtgtgtgtgtgtgtgtgtgtgtgtgtgtttaatagtcttgtatcctctaatgacacaattgctgcttttggattttcaatggtaagccccctaaagtctaacaaattacttctgttgatatttaaaatttggcaccccctggaaagagtagaaactgaaatttccctgaaagtctagaaaccttacacagcccttttagcaaacaagtaaaacaccctctcggtgttcaatccattttatcaactggaaataaaccccaatccattcatgatttccaagactatgtcctgtttttctcttcagtccctaattaatcatcttccacatttccagtcttagtttacaggtaactccagcaaggcaagtgttctttgatgatgatttgaatcatgggaaagaggatttgcagagaacatttccataccccatagtaaattctagccccagagtaacaagaaaagcaccattacctggcttgtcaccatgattaagtcacatctgaggctagcttagagagactgtaatggcattatgtgtgtagtgtggtaaagagaaggcacagctctttaaagtggtgtgggaaaccctgcgtctgtgacaggataagggataacagagctgttatgcccactgagatttcagtgagtagttgtttcctgagctgtgtcatgtgtagcatggtatcgtctaaagcatattaaacagtctatttgggaggctttcttgcctttttcttttattctggttaatcatttcaagtagacatggattattttgatttttcacagtgtatctctcagggttctctgaagaatttccccctttgtaagtctgagaccattttagataacatctagatactttgggttagaaacaattaaatttggaaaatggatatttttaattgccccaagtcacaaaagcagatacagaatgagtaaaatttgtgcaaccagtttcctagcagtggaagggggcctattgcagtcatcttagttttgccttctatatcctaataattactttaaattaatttcagattcttttagtgaccactatactcactttgaaacagttgtgaaggctcttctgatcaatgctttcgatgaatcttttctggaaaccttgtatggtaagttcatagtaccactggaacattttaaaatttttcctaaatagcttttgaaattagatgaagcaaagctaagacaaaccattcttaaattttgccagttgttccttctagaataaactacactataagtgcattcacatgaaaggcttgttaatttatttgagatatagatggtaagtatgtgacaagtcattgctctaaaagattctacagtgaatttgtgaatatagaacatacacccataaaagagaaggctgcctcaacattcttgtgctttctcaggtcctcgaagaatttgaatttcaccaaaaggccatgctattttctgcatctgtgccctggcccatgctgttctctgtaatattctaggtaaatgtaaaatatttctgttgtgaaaagtatgaatacttttcattgccttgctcatggcactctcattctgagtatggtcctatccatatatgtgaattcctgtgttgtgttgaaaatatatctctgttttcttgccttaccagagtataagaaattaaacttttaatatatacacatctccaaaacacagaatctgacatttcattcatagactatgcatatgttgtaccgaatacctatcagtgcctaaataagattttattcataagttatagaacacatatttcttgaatgccatatggtccaggcattatttgaggattggtgatatggtaatttcaaaccacaaaaggtaaggaaacattagatttatatcttttgtggtttgaaattaacagacaataagtgagtaaacagcataatatgtgaatgaaaactagtatgtacttcttgtgggaataggtatgcatagttggataataagaagagaagctaatggacattagatagatgagagagagagagagagagagagagagagagagagagagagatggatgaatggattctagcacaattagagactttttgtttgttttgttttgcgagacagggtgacagggtttctctatggctttggagggtttctattgctgggataaatcaacatgacaagaaaagcaactgggacaggaaagggtttatttgtttatttcagcttataactctcagatcacactccttcactgagggaagttaggacaggaacctggatataggagctgaagcaaagccatggaagagtgctgagaattggcttactacccctgacttgctcaatctgctttcttatacacacaggactaccacctgtccagaggttgcaccacccacaatgggcaaagcccacaaacattaatcactaaaacaattgtacaaacttgcctaggcaagtcttacagaggaatcttctcaattgaaagtccctcttctccgatttgttaagttgacatctagccaggacagattgataggtaaactataatatattataacatatatatgtgtgtatgttataatatatttatatattaactatatatgtgtatatataacatatatatgaagattggacagattggccaaataatgtaatgaagtatcttttaaatataaagattagtaaggtgaatatattagtttactttatatttctgtgacaaaagcaatactgaccaaaagcaatttaggaattaaagggttttttggcttatgtatatatactaggtcacagttcattgagggaagccaaagcggaaacttggagacaggaagcgaaaacaaaggacatagaggattgctgcttcctggattcctttccatggcttgcttagctttcttatataacatagtcctacctgcccaggggtaggactattcacagtgtgctaggccttcccacttccatcattaataaataaaatgccctacacatttgcctatagttaatctaatggaagtattttttgtattgaatttccctctcccaaacaccaaccaggacaattgacccccttatcagtttgatacatcaatacattactatcataacataacccttcccttctagcttgtttataatatttcatatttatataaatatctaatatagaatatattccaacttttaaaagctccagtcgttacaaattgaaacactattcagtacttggactgaaacttcacaatccaggcttccattgtctacattgctttcagcgttcttatctttcaggatctcacagaacagccctttaagctccaagcactcaatgacttatccaatccaaagttccaaacatctccataatccttccaaaatattgtcagctctgtcacagaaatattctacttccagatccaatttctgtatatagtctcctttatattaaaatactaaccaaaggcaatttgggggaaagggtttatttggcttgcatatattgggtcatagtccattgagggaagccaaggcacaaacctggaggcaggaactgaaacagaggcatagaggagtgctgcttactggcttgctctccatgccctgctcagcctgctttcttatacaactcaccttgtatttagagaggtttgtatcgagttagacaaaaccaaaccagaacatacatacatacatacatacatacatacatactgataatgctattatgcttacagtcagagtattcaagaacaactaagaagaccgatgtcatagtgcagtgagtcaggagtgagggtagaagacttcaaaggagctaacagtggaaagaaggcttttaattcatgatatagtatttaaatctgtagtgacttaataactataataaatttattagctacattcatttggaaatacatttctgaagaaagtagaaaaatgaagcttagcatcacaggccatgacaaaataaatataaattgagaacaaactattagtcaaattaggaaagcaaaaatgactgtagtgtgcaatgagggaatgagggggaagacaggcagaataggcttttccagtgtgttgtcaggagttaccgctggatcaaggatggagccagctgcaggagtctgtaaagcatcatcagtaattcagtggttatgcaaatgcaaaacagttttaaaggaaagagaaaaggttctgtgcaagcctttttcttggggttccttctgctgtcagatgtacataataaaaaaaggttggtgtttacaggaagttattagaagctgtgccctgttttctgcccatgtgcttccaggaaatgaaccgtttacttcatcatttcctaatttaaaatatttacaactagctagccatctttctaaagctcttacacatccataatgttcagttgattcagtatttcaagtgttctactgttttttgttatctgctcacagctggcaccaggaagaagtcgtatgcacaagatatgttgacatctcttcattatttggataatcgctttattcaaccccgtctagagagtttagtctcaagaagtcgatggaaagaacaatataaggtatatagtttgccttttaatctctggtaagaacatggggacagtggccctctcaagatttcaatatccaaccagatgaaatcattttctgaagtgttgccattctgccttgttaaatagtaactgattttaatttctttctcaagtctttattgttttaaatatccacactaatgtcttcaataattaaatggttttaaataatttcagagcatctctagggcttggcctatcttaaaatgaggaggttgtcttataagatggttcctcagggaagaaagtcacatagatgaagaagtttgaaaagacagcatctaacttaaactgcttctgtattggagcacttttctgagcactgattcatgaatctatacctcagatctacaagagggatttagacagcagcatttctcaaattatagatcccatgaggctgtttctcttgagatactagttattccttctactgttttttatatttttgtgtatatatgcttgaagtgtgtatgaaagtatatgatatgtgtgtgaatgaggacacatcctgccacagtctactgtgggaagaggacaacactcagcacccagctttttccttccactgtgggttcctgcaatcaacttccatcatcagacttacatgacaacaaatagttttactcgggagccatcaattcagacctgtcttagggtgtttgatttccataaaacagtatgaaagatactgagttacatcatgtttgacatactctcaaacttaagattttataattttagcaatttgggaatttgacattttaatgtaagaattactagatcctttgttattttccagctttgtattttagtatatttaatggcagaggatgaactatgttatatttaaaggtacccctattgctgatattctattttctaatgattaataagaggaaaatggtagataatagactttaaaattccttaaaatctccttagcagttcaatagtttctatgctcatttacttcaaaaacttagtttcatcaagaacccttccgcctgaactacacctgatgatagtaaatggttcactttgaggggcagtcagggacttacaaattctaagatttcaagttcaaggatgccttgaatttagaaccaccatgtatatcttctcatttgtagattttaacacctctggatccccagtttattcctcagctgtaaatatacaaaataattgttatagtattattttctttaatacaaataaaaatgttacaattttaaagaatatttagctgttgactaatgatttacatgtgaaatgtattaattacttaattttaaaagtaagtccaaaagggaggaactattctctcctctatttacaatgaggaaatgtaaccacaggaagcaacattccacagctattaatttcacaggccagtatttaatagtttaaaactattaaatactttaaaactcagaccttgaaattatattatgcttgtcacactggcatgttatagtggattttaaaaacccaggatgatataacaataagaaacacagaattgtgagacagatgattcagtaaagtcttggggtacactgagttatactgcaaaagataaagtaacatgaagaaaactcactgattcaacccagaaaaatatgtatgccaacttacatatggagtgcattctgttcatagtagtcacccacaaaaccaagctgtttgagctttcatcttactgtcctatcacagcaccacagaagcaggaagggaagagggctagtctggacctaagtctgttagtgacatgctgtgaagtgtgaagaatttgacaggtaaatcagaagtgttgcagatcacacaatatgtaaaggatcggtgtttcatctgactggtgtaggggatgaatgtggatttgtaactgtgctagcaacatacttagtgtgttcattcaagtgtgatattaaaatacactgctaatagaacatgactatacagcacagcctgcatgtgagcacatttactcgggtacaagtaacttcattgttaatacagtttgcttatttcgaacagtgtttctcacattgttcattcattgataatccagtcaccagacagcccatcagtactggacatggaacattattaattgcaaggtgcttattttcacaaaacaaagcaggtgactgtaggagaattaagttatttgcagaatattttgaggaaaatgtgacttaactcatgcactgaagaatgaatggaatttttttttcaaattctaactagcttaaatgaatttgtctttctcttatcctgaacttttgttgctcattttcctacttaatatctcattgatgctacttacagatgagacttggaaaaaagtaagttaaagtctattggaaacagtacttattaataatttgtaagcaaagagacagatgaaactaattgtttttccttgtttgtttttatagccaagattaataatttatttttcaatttaaaaataccttcttcaagtaagaaattccatattattcttatatttttcccactggtttccaaaataagttttattttggatatattcatatttaatgtaatctccattatttttaactattatcaggagcgagttgaaagctactctacactaagtatccattcaaagaaccctgcggactgctcctgccaggcttgtgggctgcatcgccactgtgtatactcagtgcatctctcaggaaagctgtacaacaccaggacaatggagacagatgatttcatgtcacatgacaagcaggtatcttttgctaatctatgccttcgatatttagaaactttaggcttcatagcttgtcctctagatagttcttgcaaatagaaaaaccactacaaagaaaagaaggtaagtttgtttatatggtagattactttgatagatttccttatgttgaaccaaccctgcatcccgggaatgaagcctagttgatcatggtggatgatttttctgatatgttcttggattcgatttgccagtattttattgagtatttttgcatcaatattcatgagggatattggtctgtagttctctttcttagttgtgtctttgtgtggcttgggtaccaacataattgtagcatcataaaaagagtttggcaatgaaccttctgcttttattgtgtggaacaatttgaggagtcttagtattagctcttgtttgaatttctggtagaattctgcactgaagccatctggccctgggctttttttggttgggagacttttgatgactgcttctatttcattaggggttataggtctgtttaaattacttatctgtttgtgctttaattttggtaagtgatatctgtccagaaaaattgtccatttcctttaaattttcaaattttgtgaagtacaggtttttaaaatatgacctgaagattctctggatttcctcagtgtctgttgttatgtcccacttttcattactgattttgttaatttgcatgttctctctgccttttggttagtttggataaaggtttgcccatcttgctgattttctcgaagaaccaactctttgattctttgaattgttttctttgtttcaactttattgatttctgccctcagtttgattatttactggtgtctactcctcccgggtgaatttgtttccatttgttctagagctttgagctgtgatgcctactcactggtgtggctattctctagtttcttcatgtgagaacttagagctatgaaatttcctcttagtactgctttcaaagtgtcccatgagtttgggtatgttgtgtcttcattttcattgaattctaggaagtctttaatttctttctttatttcttccttgacccaggaatggtgcaattgcatgttgttcaatttctatgagtttgtagggtttctgcaatttgtattgttgttgctttctaactttaaagcatggtggtctgataaggcatgggggttattccaattttttgtacctgttgaggtttgctatgttgccgagtatgtggtcgatttttgagaaggttccatgtgatgctgaaaagaaggtatattcttttgtgtttggatggaaagttctatagatatctgttaatcccaattaggtcataacttctgttagttcctttgtctctttgttaagtttctgtctggaaggcctcagaaatctatggagcctcttgtagtaaatcagtacttaaccctagcataggaatggactgtggtagcacattccacatagaggaatactctctcagcctcgacacatgggggagggcctaggtcctatcccaaaggatatgacagactctaaagaacccccatggaaggccacaccctccctggggagcagaaaggttatgggataggtagggtgttagtggggcacaggggaggaggggaaggagagggaactgggattgacatgtaaaacaatcttgtttctaatttaaattaaaaatggaaaaatataaaaaaagaaaaagaaaagagggtacttttgattttctttatttctatcagtatgccacagatactaaacctagggcctcagcttgctaagtgagcacgctaccccttatgccagggtacaattttcaaaggtgcaaatgtgtctttatagcacattcacccctaattcagtgagatcaaatcagtacgtagccttaatctcagtgagtcatatcttaggacagagatgtataggatcagagtgataaagaaggtcacttgggcaagaaaacaggtactgcctttgaagtccaaagaagactataacccaggtcaagacctcatgtcagatagtattcaaattagtggtttataggttaataattgaagatgcctgttcatcttataaagagacaattcagatttttatctggcatgccagtgtctagagcaatcatttacctgattaagatgatgttaaatctggacatagagaggcttcaagaataaataatggctaggcttggtgcttcacacctttaatctgtgctcaggaggtatgcagaagcaggaataggccagtctgctctacagaactagttccaggacaggcagggccacaaaaaaaaaccctgtctcaaaaaaaataaaaaataagtaattgacaagagtgggaactcataaaaatacatattctgtttttgtttctaatcttactttgtaagaaggctgaatttgtaaatatttgaaaacttcttctagtgactctgcttatctttggagaatgtatgttttgggagaatagagagaactaaagttgttcgtaaatcttccattattaaagtagaggaaaaaaataaataaaaatgaaataaaatggaggaaatatgatttattgggaagtatgattcattagtactgttggacagtagttgaccagatctctgttaacattaaaataaagattaggaaaatcatttatagattttattcttggggactggagagatggctcagtgattaagagtattgctgctcactcagaagaccctttttcagctctcagttctcacatggcagctcacagctgtttataattccggttttatatgatctcatgcacagttctggtccccatgggctcctgcatgcatgtaatacatatgtcaggcacagacacacacacataaaataatgtaaaaaatgtatatatgaataatgaattcagaattgttctttatcaatattgtatatgcaatttcctcattgcttaaaaaataacctatgatttttataagaaatccagaatcttatcaaaagcgattgaatacttcaagaaccatatcctgttgtatagatcaaatatattgatttcaacatgcctttgttacatatagctaatcctggaggggaaagtagagttaaaaatcattcatagaacttaacattactgagaagaaataaagtttctatttaaactggttaattcaggtatctaaaattaaggtcacatacaatgggacatttgtctaatcctaacatttaagagtctgagacaggaaaatatgaattcaaggccagtttagggtacatagcaaatgccaaaccagtctgatctatatagggagactctgtttcaatcaaaagacaaaaggacaacaacaacaaaaaaaaaaaaaaaaaaaaaaaaaaaaaaaaaaaaagcataaagtgcctaaggaaaagagagctgggagagggagagggaaagggatagatagcagaggatggaaggaaaggaagaaaaagacaagagaaaagtgaggaaggggaaagaggaaaagaaatgaaaccaataggtgaaaccaaaagagcagagtcacagttgggaaaatataaaagttaaatacaagagaaaatgctcattctccttaggaacatagaggtaaaactatttaagatttacattgatagctcttaaattactatagtatttttttcagatttttttaatttgaattagaaacaagattgttttacatgacaatcccagttcccttctccctcccctcctcccctaccaccaccccccaactaaaaccctacctatcacatatcctttctgctccccctggatggtgaggccttccatagggtgttatcagagtctattgtgtcctttgggatacagcctaggcccacccccgtgtatcttggctcagggagtattcctctatgtggaatgggctcccaacgtccacacctatgctaaggataagtactgaactactacaggatgtcctgaagatttccgaggtttcctcaatgaaatccgtgttcctggggtctggatcagtcccctgcttgtatcccagctatcagtctagggagcaagagttccctcatgttcaggtcagctgtttctgtgggtttcaccagcctggtctggacccgtttatagtatttttaaatatatattttactatagtattttttaatcaaatgttgaaaggttgtatgatcagcattatttagaagtttgtaggcttatgtaaagtgagattcctagaggaagaaatatctggtataattttaaaatacaggtgactgtatagccagagttgctacagtgactataagtttatcctatggaaataaattaataaaagcaaatgacatcattgcaaagttcactgaagcattcttgataaggagtgaggtacaaaatagtagaaacagtccaaataaaacattagaatagtgacatgaaagtctgatatacaagaatgcgtggcaggatataataccacttattcagatgatgttattagtaatagttatatggctgttttgaaatgatgctaggtaaaataaattttcttcagtaattttttatttcaaaaaactcattgtattctaattacctcataagcatatcacagaactagtttaaggaaaccactaaaactttattttttgttttagcatagaattcaatagtttccagaaaaagtataatccgagtctgtcactgccatttactaaagttattttctatcctattgcaccactgtgtcagtgcatgcaaataaagggaaaagcacatgtacttatattctggggctttaaaagactgtccacacctccacccactggcctcatattgtttggaaaccactgtctactttgtcattgtactgaaagttacttaaaattgaaagcctaggattaaccaggttcttttcgagggtgcagtaaaattgtgattgttgataattttcttttgcctgacttaccaaagattagattatttgaaagaaatgatatgctttgatggaagatggagttaccatatgtttgacaagaggccttggatcacaaggacttggggtgggggtgggggacaaagaaaaacaagtcttatcaaactcaggaaatgaaagaaacttaataatgctcacaagaccctttcccaaagctatatatgcagaaacagttgccagaagtgggaagaaaaggtggtggggtgatggattggttttagggttgactgtacattgttcaggctgctccaggaatgcaattcttgtgaataagttgtcacctgtgctggggcaggcttctcagttttgcacttgccttttattcatccatgttcctgtatgtaactccagaaaactcagtgaaccactaacttaatcttaagtggaaagttttctttggtctgtttttgagtgccatacatgaagtgaataaatatttgttcatgtctctccagaagtcacaggccaggcaatgtggcacacacctttaatctcatcactcaggagtcaggagcaggcaaatcttttgagttttagtttgaggctggcctggaccacatagtgagtttcagaatagccacagcttcacagagaaacgctgtctggaaaaaacaagtaaacaaaagtcataggatataatgaaatgtccaaaatgcttcacttaaccatgctgtttttcagtcatcattattgaacttgaatttctttttggcaacatattcctggtctcttaccttcagagcatcattaactctgtgttcctgtgtattgcagcttcagaaaaagtgacataggtgactattaaaattatgtagctagtactgaacttgtgcacttgagcatagagacagatacttaagtcaggacatttgtgccttcagatccttatatgatacatcatgttgtgttcttggagcccattttggtgaattttctacaaagagtgaaaatagtgtgaattaagatgtatttaatttatcagtgagtgatattgacttcctattttagttggatagtgaaacataaccatcaaaacaaacagaaatggtctggttgactgattctacaaaagggtatcatagagtcctagaagtccatatataatcaaagcagacaataaaatgttaatatctcatttatacatgacacatgaattaaagccaaaaatatgcctacacacaaagaacattttactttacatttgggaattgtttaggaaacaactaacaatacttaacattggtgtaaaagtgcttcacttttagttgttgcttatatttacaatttatcataatctgggcattttaaacacaaaaaaatgtgtaatgccatattctgtatgccttctgctttagtgtgtgtccatttttcttccttaaaagcaatttctctctttcttcccaaattcagaaaattgttttcagaacttcaagaattactgacagaggctaggcaggtgttcagtcaatagaggactacaagcataaagtgcctgagatcaagccccagcactcactaaatcaatcaatcaaccaaccaataaacttaagctctggaatgcctcacctgtttggaaagttcaggaccagtgcgaaatggtgcctcaaaataaataggattattggagcctgaagaatgataactgagattgccctctggccttcatatattcatgcacacatacaaagaaacatggactgacatcttggtagcattctgatcacaacatttggtgtggtgttttataatcatctttctgataaggcactaagctcctaacacaggtgctgcatcctcacttagcttccatctagcccctgcctaatactgggagcacaaaaggtgaaggttctgttgactggttgtatagataagataaagggaccattcttataaatatttaaataaaattaaaaacacatgttttagataagggaaatctgaaaaccagaagtaataaacatacatacatacatacatacatacatacatacatacatacatatacacatacatatacacatttattcacttcatatttgagataacgacatatatttctcaatgtaggtatttactgttggcagaatttgtgctgatcgcaccagaatttatcataaactaaaacattttaaattcaaactgtaccaagaatgttgctccattgccaaaacagaagaagatggagatgaacaggttaaagaaacagtaggaagagtcttcagtcagtcaaaagaaagcggctggattagaaaggtaagacttagaccttctcattctgcagaatctggaggtttgagggtgctagcaaaaagatgacatttgtagacagtgttactacttaagaaatcccttctctccctattcttatgtttcctcttctgctgcctattccttccatgtttgtcattgttctattgtaaacagatggcctgatgtttttaagaatccactcacctcatgtagattttattgaacaataatgctgtaccctatcaaaaggtctttcttctttgtcttttatgtgtatcacccttacttacatactaactcacattgtgataaaatacaacgacagaggttatcttaagagaaaaaatggctattttggcttacaggtatgtgctatagtccatcatggtgaagaagtcctgtggcaggatcttgtggcagccggtcctatttcaaagtcaagaagtaaagagattaattgttctgctcagctagctttctctttctgcagtccaggacccaagcctagagaatagtgccacatacttttaaggtggatctttctatcttacttcacctaatctagaaaatacctcaaaggcttgcccagagatttgtctcctgggtaattttaggtcctgtcaagctgggaatcaatattaactattatattgcagggtgtgtctggggagtagggtggggcaatgaatgggactggcctttgctagcctgccttccttcttttgaacagtgtgatttaaaagtgaaggagcatctggtgccagcctgaggaaaggggccacatcaccaattctaatacagccagaacctcttcttgaggacttggggctgattgtgggcacttgaggacactgtgactgaaaatggaagggcatgctgaggcttcaggctgtggaacctttgatttccctgtaccttgacaccccctgaatttgatatcaagggtagagtgggagtggccctctcttggcctttcatagtgtcaagtctccgctgtgttccatgaaccttccatgtcttccaaactagtacccattaccaagtttggctaccagcaaaaggtctgtgtgctgaccctgagtaaacacttcctagaagactgcatctcagtgatgctggtctcaatcacaattcttcagcccaagtgactagtatcaattgtcctagaaagcaaggatttcacttcagaggatctgagctcttgataatcacaactgattcttcaaccccagatgatcagaaccacagattcttaattcagtgtatttaaaggccctggtagattctttaagggactttcaaacttccttctgaatcttcacatcccaatccttcatcatctgcattgctctcagcactcttccagtctctgcggatatgcccactgatctttgaacactcaacagcttttccagcccaattttcaaatgctagcacattttgcccccaaacacatgatcagatctgtcacagaaataccccactcatcattccaatttctgtcttagcctgcttcttattgctgtgacgaacaccatgacctaaagtaacttgaggaggaaagaagagttcatcttacatctctcaggtcacagtccatcactgagggaagtctgagaaggaactcaaggcagaagctgatgtagaggccatggaggaatactgcttactagctactctctgtgacttacctaacttgctttcgtttactgtccagggccacctgcccagaggtgtgctgagccctcccatatcaatccttaatcagaaaacattgtgctacagaattgcccacaggcagattgtatggggcattttctcaattggaaattcctgttcccagatgactgccacttctgtcaaggtgacataaaactacccagcacatcctccactaagagaaacatttaacattagatgttaaaagaataaagcatatacctaagacagacccagttttccctcgtgtaaaagcagcaaagaacttcattgtgtcttggattggggggctttttaaaagattttaatttaaaaatagttgtttaatacttttccaaaaaattccctagaaacaagagagcttatatccagcataaatacatacattgctttttatgttatgataaaatttcagtttgtcaaatgctctgacatttctcagtcttgctatcctgtagcgtgagagcacactgtatgtgtgaacgcatgcatttttttggctgcagtcaccatgtcttacatttactcttcctctctaaagtgcctgggtctgtgctacttggagcccatctcagtgactctggatgttcccatctcccagtgtgccacatccttttcttgtcttgcacacgatgctgttttctgcttcctgcttgtgtttctcactctgctccttacctgtcccttctctacttaagcgtttttcttcttttctcccagaatcttagtctgttcaaccatagactaaagacctgccgactaagcctcactctttttttcctcctactatttgtgatagaattatctgcttttagtctaatagtcaaggggtatcaagttagctttaatacaagaaaagagcaaattataggaaaatcagaatgaaaacaaaatctgcaaacatacatgccattctaaaatattccaatgtgcccaacatctctttcattaggaagaaaatatacatgttgatgggttttcctgggagatagacaataagattgttgggattggttgataagaatatggatatcaggaaaagaagatagcatgtcagcagaagtggcaggccaaagggacagggagatggctccgtaggtgaagtgctttgccacacaaccatgagaatttgaattcaaaccatagtgcccatgtaaaacacaggtacaatggcatgtgccctaattccaattctctggagaagcagagacagggggatccctgggtgtttctggccagccaaatgcatgagcatcagattcaatgagagacttcgtcttgaaagacagagagcaagatatcccacattgacctctgccataaacacacacatctaaacacatccataaaagaagaatcaaatctgctttacagctatatttaaaataatgtactacagaaataagaacttcgaattataatgagatttcccttacttaagtcttctctttcaccctccccttttaacattttattcttttctttttcttctataccttaagttggtatttctcaaaatattactcttaactacctatgtcaaagtcacctagaaatttgtggaaaaatacataattcctggccttacccagaccaattgaatgaaacttcttaagggtattaaacatctaacattctaaaagttggctggttcttaagtaaattaaagatggagggcttagaatttcctgttgagcttctacctgcacatcatttcctttctgttggtctcatttgctccttctgggtagaggatgccaggctttgctgagagtctgactactttcccttccccatttccacagtctggaatcttcttgtcagaatgttcatctggtactgtatgggagtgctcttcattattaaagcaaagcctggactccccaaaggttctgtgatgagctacaggagccgcatcttcaggcagagaagatggcagagtggtcctaatgaccttccctctctttcactttcccttttgtgattttcatttttccccctctgaatagctgttgccccacccttgccatttaaaactcaaaaacagcatcctataaaggttaaaagcatgcatctgaatatttgtcctgccactggctagcagtagattatgaaagcaagttactcgatctctctaaacctgtttcacccctgtaaaataggaattaagcaataattaggacttcgatcatgcaaatgatggatgatatatttaaggcctggaattagaaagtggtcaactgccattagctgttatttgtaatataagcaagcaaagattgttatttgtttctcttagtatgcagagacacattttaattttccaaagcaagttttataaataattgagcaaacaatataaaaataaaataataagcctaaaacagccagttttttaaggtgcaggttttaaatcatagataatcttacttccacttacttccatgcactaaaagcaagagaactcttaagtggcctatgctagcagatcactgtctatcttgttcttttcttccatcttccctgaggatgttgaaattatgaaaatgggcttctgggcctcccatggaaatacaatatttacattgcttcccatgaatccttgtcatcatagaattcaggccattgaggtcttctctcggagttcataaaccaagttagaaaaccattaaataattcaatgccttcaactgatagaaatacttggactctgtctaaatgtgaactcatgtatcttccctgttccctttctgccttagatagtcctacctgccatcattcttgtactctttcaccttggaatttccaggacacccttaccccatctcttaacatgttccatcctgttctttaccctccatttccattgttgccccacagatttgagtcctcattgcctaatttgtcataacagattcataactcattgccatacagttatagaatagctaaccagttttctgaacatgtacttcaaatgaggtcagtcctctgttctaaaatctttggcagcatcacattgcatttcaaatctttgctcaatccataacctagtatttcatagtttttattctctgacctcaatctctttggttcaatcctacctctttctctcagatggcatcacattcctatacacccttgtcatggtactgctggataaactgttaatctcttggactggcagagggatacttttgcctctaaattttttcctatcaaatatttttgtccagaacaacttaaatgccagactttcctggtcacctaaactattcatgacttctcttctgagccctctctgcagttgtgctggttgccatgatgtcttgtcttagggatgggggaaatgtcttttaaagccctgcccctcaacagtcactagtaggaaactgtctgcatacatacacatctgttctaaaagtatatgttggattagctattgaattgttatatttatgctatgcttcacaattataacttgtaagatatatgaattgataacactattatttgatttctttccaatgctttttgagttagaaatgtttatttgaaacagaacttctctttataatgaagtgatttttgttcccacttttccattagacatgcatttaagtagtttgaaaggcctatcttatttgttgttgtgagtaaagtgactaattttgtgttgtatgtgcagaaatatgatcaactgcaagactatctcaattctgcggattactttcaagatgagaagtttgaattatagcaggtttccttcagagaagattgtataagtttctgtaaatgtgaagatcatgagttttgtttctctgtatcatgtaacatttgttgtatattctttatggcaaaaatcttgtttatatctcatctgattttcatgaaatgccacagtgaagtctaataaagcctgcatagatgtacatggagaacatcagatttgtgattcaaaactccatcaatgtatttggtcatgtattgatgattttctcataaatgacctacaattgaatgttctatcatgtcctcctgtcagtttagtagaaataggctgtattaaaatatatttggactgacctggagatggctcagtcagtataatacctgccttacaagtacaaggacctgagttcagtcctcagaaccttatttaaaataaaagccagatgtgatggcatgaacttgtaatccctgcactggggaggcaaagaccaggcagatctccgaggcttgtttgtcagacaaccaacccactctcatgccaatgagataccctgtctcaaaacacaagttgggtgttgcttgtaaatgacacccaaggctatcctctgagctgaacatgcatgcaaacatatatgtacatgtgcccacatgtgtgcagccacacacaggcaccttctcatccacactatatatgcatgtgtatattcatatatagtgcaactcatgcctccctgcgtatgaatcattgtattgttgcatcccttagcagtattaatatgaaacattcagtatcaatgtctaattagtgtctcctcaatcagtgagccatggaagaagcctcaaattaccatggatttattatcctgacctcagaatgagaccagagcttgtctactgtaggtgccccacccttgccatttaaaactcaaaaacagaacagatgtctaatctgcaggctctttcaatcctcacattcaggaagaacttgttgatacatattttttcattctgtgcaatgttctttcttgtttctgaacagttttatctggaatatatcaagtattgagatgtattttgtgattttttaaccaaaacattctctatgtaaatatatacgtatgtatgtaccagtctaaagatctcagctacaggttcagccaaaaaacaattcaaaatcttatttttgtgcctacattactttacacatcctaattttccataattcaataaagtggtttcagagtaagctgtgtattctgtttctttaattcttaaagggaacacctgttctcctgtggcattttatttgctttcttcttactggaagtaattggttgaagttagctagtttcatctattgtgtgatgcatggcatgtgcctccgtgtatatattacataaaactacatttcatcaagaattacatggagtttgtattttctgcactatatttctattaagtattcatattggtcttttaagccagtaagagaaagaaatgaacagagagagagagggagagagagagagagagagagagagagagagaagaaaaattacaggaagtgcaaggatactgaggccgatgttgacaagtgaataacagttttcaggggtgaagcacacttttccatcacatgcctactgctatttgtatttctctggtgcatgggtaactaccatttaactcacttcagagaacaaaaatgaatccatgttcaaaaaaaaaagatggaagtacagtgtgtgcagggaagcaaggcagaatccaaggggaaatgatggactatgggaggtatgagggcgaatccaagggaaattgatggagtatgggaggcgtaagggcgaatccaaggggaactgatggagtataggaggcatgaagatgaatccaaggggaactgatggagtatgggaagggcatgaaggcgaatccaaggggaactgatggagtatgggaggcgtgaaggcgaatccaaggggaactgatggagtatgggaggcgtgaaggcgaatccaaggggaactgatggagtatgggaggagtaagggcgaatccaaggggaacttatggagtatggggaggcgtgaaggtgaatccaagggaaactgatggagtataggaggcatgaagatgaatccaaggggaactgatggagtataggaggcgtgaggttgaatccaaggggaactgatggagtatggggaggcgtgaaggcgaatccaggggaactgatggagtatgggaggcgtgaaggcgaatccaagaggggaactgatggagtatgggagtataggaggcgtgaggttgaatccaaggggaactgatggagtatgggaggcgtgagggcatgggggcttgtgtaaaggaaggaagagagaaaggaaaaagataacctgaaagcatcacttcttcatgtggcaagcttgcatctcctgtaaaaggagacagtttaacagtttaaagttattattttcatagcactcaattataaggtaaaaggaccaataatcctggtgacttatgacagtaggtgatctagttcctaggttagtcacactgctgatttgaagcactttcccaaatacagcaacatattactgatcaaaatgcttgcaggtggtgtttctgaagtctgaggctgttgcaaccaaatgtactcctccaaggagtgactggagcctccaagaatctattgggtatttgctaacagcaaaataattgataaaaccataggttattagtgagacttagtatgtattgacagccccaaatccagaagacggtgagagttgtgtgaaaaataatacaattaaccttttcttatattatgacattgcattttatcactattatcagtattaatgcaataacatgacaatgaactttgagcttctaagtttcaggtcctctcacatgactgaatctttagattgggagcatatgctaccatacgtgttagttgttttagtgtttggtagctttgaatagtagagatgatgagaaaaagttaggcaaaggagaattaatgcttgaaagaattcaaagggctagacaggggctgtaggtgtatgaggaagcaaactagaacactaaaagaatgagggaactgccctccctggggagcagaaaggggatgggacagggctcaaggggggcaggggaggaggggagggagagggaactgagattgacatgtaaaagaagcttgtttctaatttaaattttaaaaaaaaaaagaatgatggggctggaagaaagaattctttcctaagcaattgggaggacttaactcaatttcctgattgtctgttctcatactcagttatttgtacccaacactcattctttgggtagtataggacctccttgaactccagagtggtcatggggggtattgtgtcccttgagccacgccagcttatagtgctttacattaagacagcaaatgctgtggttgagagaacctgggtctgaagagtcctggtctaacctcccaaattattgatgaggaacaagtaatcttgataagtcttcatcttcttctaagtgagaaactgggtgaagctaacaatatgcatctccagaaatgtctttgttttgagataatctatctatgtgaagtgtaggctttaagtgtgtttttttaaataagaaaaaaaaatgatgtgcgtaagtagaaggatgtcaatgataaatggcaaccagaaattaaatggctgggatatatacaagtaaatatgcatagagggggactggagagatggctcagaaattcagagcactggtttctcttgcaaaggacctaggttcagtttccagcacccaagtgatgactcacagtcaactgtaattccagttccaggggatccaaagtccttttctgtaataagccagtgcagcaatgcacacatatggtacacatacatacatgcagataaaacatacataaaacatttgaatgcaaacaaaagacactctagactccagagtccaaaggagtgtcttacatactggaatgtagtatggaaggaaacctttatgtagaagtcttgcttcccaagcttttaatttatactgctgtcaaaattacaaaggaatggtggctggagagatggttcagcatttgtatgctgtaagtgcccatgaatgcaatgcaagtttattacctgagttcagtcactggagcccaagtggaaggatagtactggattccacaaagttgtcctctggccacatgcacaactgtactcagatatcataaaagagaaagaaatccaaaagccaaagtttattatatagtatatacatgtattgaaacaagacacaagatcctaaaactatggacaattttatgtcaattaaattttatctcaatttggcaaatttatcattcttataatttgtattactaagagtagcttatttggccaatggcatcatactgttaagaactatattatcatagtctattgaatgagtggtgtttttagtttaaatattgcatagtttggttatgactgataaatatgacattttataagtagaagttagttagtagaaggtgttgtctactgaaccctcttcctaaaatttaaacatgcaatgttcagaaatccttccctttttatgataggatgcctcctgatggcaggactctcctttctattgttcttctataatgaatggtttctcttttttccctcatgcatggggagggagttggctttgaagaagacagggaggagtattatattcccaagaaaagccagaggttttacagactcagagtagttgactcaaaaccaatctgggatactgtagaagggaattatttaaacagagctaagaaggtggatttgaggaacttctggaattagagatacattcaacttgtataagtcaatctccccaaatcaaaaacaaaacaaaacaaaaacaaaaccaaccctgaaatctgaaacactttggattccaaacattttggatgagtcataccctgtcctgtcagattgtgtgtctacatgtccaacttaacatcttggaacctgtgaaaacaaagtgggctgcagtaggccagacttggggatgggactgtgggtaaattcagtcttgagattcattaattttgttcacttctgcccatagctcatgtttgaagcagagccatacctctgaaattctagactgttacctgactgaagttttgtgtcctgagacctcagctccaatgacttgtaaattacagcacttgtgttttttgttggttctgactgccaatgctgtgcccatcttcttggatattttacaaaccacaccatcagaagataaggaatcaataccttttttgttgttatgaatgttcttgaaatcatgcagcacattatatatgccaaccaggcagctatggacaacacgccttcttgtatttggtgacttttcaaaggaaaacatgtctctctctctctctctctctctctctctctctctctccctccctttctggaggtattggcaatatcagtctcacacaacgtttatttatccctactgatttgctcatcacccccccccccagcctgttgcccaaactcattgacccaccccactgcgtcctttttaggagacagggtggacttccttctctccatctccagcactaactcaccaacttcctcacagtgtaaatgagcttttcctccgtgctcacccagctcttgttggggtgcccagtggtgtcgtttgcagcttattgaaaacggaaaatcatatcgtcaggggggcgggctgcgggcctggaagggggaaaatacactccatggctgggaattttcttcagcatgagagcttctcaaacacttgagagagaactagggatttcccccctgtgttccccccaccgcagcacccaggctgaggctgagtccagagtcgcctggagagtaggtgcaggtctggagggtttgcctcttcagccactgggaggcctctgcactccgttccccggcgcctggctgcgattactcactggagcagcggcaccagccttccaccagggagcccagctcccgccctcctcccccatctgcagcctgctggctccctctctccctctctgtttcactcactctctctctctctctttctctccctctcctatcgcagcacaatgaaagcctgtgtttcgccgtgagtccgaggagcgggagccggtgtcaggaaagcgctcggaacagacctgaaagagaaaggaaaatacaagctacttttttcttctttttccccccatctataaagcgaagcaatacaggagatagagccacattgcctatgggagtccagaccctgtgagccactggccggggatggaatgtacaaaagtggacagaaaagtggctggacatgactcggtgcaatttgctggaagtttgtaagtttgaccatcgtttgtaaattactctcggaagactttgtctctcttgatactgtgttagaatagaactgggggtgagggataaaaacgtaagtgggaaaggggaaattgtgttgaaggagccttctcagtagccagccacttcagagagctttcatttaaaactaagaaacctaagagggaatcaggatttttgccggtgattggattagcttgaagaaaagagcatgctcctgaagtccaattacagacgccgttaagacagactgaaaagctgtctcctttggggagaagactacatcctaatataacctccctcccccggagaaaatcgccaacaccggagggagagaaggggacggagaagccaagacagtctcccttgatttcgcacagtttgaacatgacttccgaagcctcgggaagcagccctgttgtttgtgttttaacctgagtaaaagtgaaggttgccggttgcgtagaccagaatagaaatgcgtttctctgcagaaacacccccataaataatttcctgaagcaactaggagaaggggagtctggttctctattaatgactctttccattccttttgctgtacgtgtctgtctcttccttgatgatccctgaattcttgaactatcccccagactttgtgtttacaaagtacctggaggctcttgtcagcctggtgggggagaaaagatctacaactctctcctaacttctcctgagctgtcaaatgcaattagaataagttgatcagggtttgtttccaacttcccctctccaattggtctctaatctttctccccaccctcttgctgcccgcgcccctcccccacaccttctccactgtctccccaccctctgaagacctctattcatgtggccctgaacactgaaaccagctttgcctgcaatactcagccccagcctctctcttgcacctcaccatcccagaggcagtaatcattgtgtccaacaagatgggggacacagcgcccccgcaggcccccgcaggaggtttagggggggctcctggggcggggctccttggagggggctcagtcacccctagagtgcacagtgctattgtggaacgcctgcgggctcgcattgctgtctgccgacagcaccacctgaactgtgaaggacgctatgaacgtggtagggccgagagctcagaccgagaaagggaaagcactatgcagcttctcagcctggtccagcatggccagggggcaaggaaggctagcaaacatgctaaggctgcagccacgactgccaccaccacagtccctccaccgccccctgctgccccttctgtggcctcccaggcaactgccacagccccaccacctccaccagactaccaccatcaccatcagcaacatcgactgaccagtaatgataatggtgggataaaccgagagcagcagccaccagcttctacccctggtgaccagcggacctctgccctgcttgcggtaaggcacctggttttctcctatgattgtggctgttctcctgtggcctctcgcaaaggtggtggttgttttggcctcatgagttggtggttgtcttggcctcatgtggaatgaatggccatgaagatggccaagataccagtctctcaaaggctgttgggtgtgtgtgtgtgtagttgtaaactcttactatcaaagtcactggtgcccattgtcattgtcctacactgaaatgtgttccttaccagttaatagcctggattttccagaggctaggagggtccacagtttgtgaaagaaggacttacagctgagaaacccttgagaacccttctgcttagcatgttaggcccagcaagacatcctttacttgacagtaacttagctcgattgacctgcttacttttccccctccctacttcccctctgaagtgcccttcacctggggttaggagtagtctatgattggcattccataacatagtatccccacagtaaaaaccatggagggagtacctcacagacagactcctgcacaatccagtctttattctggacccccagaactcatggaaggcacagagagcaccttgtttcagtccctcctgatgacaacacatcaggtccaaaagcctgagtaattttctgactggaagtgcttcctcagaggcacagacaacaccccacccagagggaagagcattgagtcattggctcttggttgtcagtcttggtcaggtgaccactgcttgtggtagttctggcttcccccacactgctatgccattcctctttcagtagaagttagaacccggccctgtaccctgaggcttccccactgggctcctgaagttctgtgactactcatggaacaactacagtaagcttaaaccaaacctgaggagaggcagagacgggaaatggccatgtgagccctgaagcccccagaaagccctcaagaaagatggtactaaggagctcctgatggaggaggtagactgttccagtctgggctacttcttcttgatgctctttcccaggtccttcatctgcagtgatccccatgattcctggggaactctggggactgagacacttctcttccccacaaggcacacattttccttgggttgcccagagctgtgattctgggatccccaggtccagatgaaaactaagcacctataattaactggcctgtgctatatccttgaatgaaactatccagtttctattgaagtttccaggcctatattcctctctctctcccctgctccatccacacttctccctggaattcccagggaaaggaagtttgtctcctgaaagagagatgctgtggagaaggatgagggagagaagaatgaggtttgtgtgcctgtgcgtgtcaccagcatctgcagccaaaagtaactaaatgccttgattgtccccagtaaatttataatctgtctgcaagcctcccaataatgtggctttgtgtgctcagagtctccttgtgagtgcttctgggggtgatactgacagtgaggcatccaggccaaccccagaggggaatgctctgccctgggtgccaagcctagcttaacccacagggtgggcttgtcctctggctctccctcccagcctcagcaaggaaggtagcatgtccctgtggctctctttggtttttgcttctgtccagttgggagggaagtttatgaggttttcttttgctggtgtgttataggagacaaaatgaaaccaacttcaatggtcttgtaactttaaggggcactgcttctgatatggggaagacaggcaatggtgcctggcttggctctactaaatggcagcttcaaaagctgacagtgttttctctgccacccctttcttggggactctcttttctctcttccacccaccaactacctcctaaaatagccccttgctggaacaccccctgagtgtagagatgaagcctgggtttttggtgtgagttaggagacaaaggcagcagcttggtccacacactcattcttctacgagagtggctggtctgatgccctgttacttactgggaattccctgttttagcttctaaatttgatgctttgttcctctgaatgttattcggtctgtgaagcaacttctgtaccatgctattatcactggatggggagagggaggcctgggcattcaggagtctcatctcaaggtctcacttctctcgggcatcttgtgttcagagacaatgttaacaattttaagggcctcctctgctgagaattcatgtcaaaattcttcctcaattttgttgtgtttctatgtccataggcagatttatgtagtctggatgtgttgaatgtaacactttactgttaatttgtatgctgtaagtgcccatgaatgccctttggagaaagggaaggtattgattatctaaaatcaaatatgcgctgtgtaccctggtgaagttctgtagccagcatgtgttgtgtggcagtgccttgggcattgtcagtactacttgccagatgaaggtgaaaggacaacttatgttggtaggataatgttgtgtgggaggtgacttctatggcagagaatatatactgtctggtctctttaatagcttgagtttgaagaacaatgtaagaataacctctaagtcagttctaattctgtccacgtgagagcctaattctgctgtccttactcagccagtttctcatttagctccagttcaggggaagccccacttctgtagagactgcaaacacagagccttgtagaaggctgagattgtagggttcggaggagactggcctttttagccactcagtgaagactttagccactaaatcactttctgctgaagtatgtttgcatcttcgaatgagctgtaaaaactcaataaccactgttccatggagcagttaggttggcacatctgtggaaattatttatcgtttcctcttgtctgaaacacactctcttcctgtgccacagaccttgtcgcttgtttaggtagataagtggtaccaagccatcttccgcttcagacattttctcttctctaatgtgctgcggaggaaagaacacaaatgagatgaggagcttgttttgtggtttggtgactgttcaatcaccaacctgctggatgaccagaacaagtcacttagcactcatctgtcaaacagagatcagctgtccatgaaagcactttcattagtgagtgtttggggaaaaggaaaagaagccagaagctccgccaatgctgctactgagctcctagcaccaaggatgaatactggctcctcttgcgtcagagagatccactcagctttcgcttgtcttttttaagtggtaaaatagcttttattgtaaacagagggattggtcttgcaaaatcagggttgtcaagataaaaccaaaatagctgtatatttaagtagctccaaagtcctagagaacactcctcaaagtgagccgtgctttgaagccttgtgtgtccttcaagcatgccctttatatctctgcatgggccctagaagccttggcaaggtgtgtccctagagtgtctatagggtattagaaaagttatttacacaaatgataggggaagttaaatattttgccaacagtattctaaaatgccagttcttagtttaagaaagtcaaaccagttaaaggatctctgaagttcccaggtgttttataagtttctaattgaccaattcagaatttcagggctgtacagggagggagtggagggcaagtctggaagactgagtatagatgtctacatgacagatctcccctctgggactgtgagaggagtattcacattatttatttatgcagcaatcatttccttaagaacagacctattttgttttgcttctcctgaacaaagtaataagggagagttcttagctatccaggtcctttctacctcattcaagtaaatgcaaggcaaaaggttccagtggagagtgtctggcacatggtgctatttcagacattgtcagagagcttgctctggtgacaaggtgaggtcatgcacatacagatactctgtgttttctttgaaataatgttgttactaagtactactcatcaatatttttctgtcctaaactttaatgtctatggcttccctatagctctactcatatttaatcactatggtattaaccaggggctttcaaacgttcttagacacagcaattaaaatatcatcagtggtatgacaacgattagctgttctcttaattttattgttcactttgattcttagcattgttatttcatttaaaaaaaatcctagtagtaaatttgaaaattaagaagcagccacccacttttgctatacatgtagaccaagcctctctgagtggcttctactgactcctcctcctgtatgccagccccttgcctgtgttcaacatctgcagacaaggccatccatgtttaatgaaaacaactctaaattcctcctccttcattttcatgctaatttccttcacactccagcaagctctgtgggagaataaaggagttgtgatatgctacagacatagcccatgctgcccacagtccaatggagaaatcaccccctgcacagtcaaacagcagtagaagttcctagctctcaggatggcctaaaactgatacagaaacttaaagacctaaagaacgcagggagctccctttacatgttttacataacacctaccaaatccaggcaggatgggtgatgttgtcctgtgttagaaacaaagacactaatactaagatgggcatgatgattcatgcttgcagttacaggactcagaggctaaggtaggaggatcaccatgatccatgagtttgaagccagcctgaactacctaagttcatatttagcctgagctacaatgtgaaactctatctcaaaagaccaagaaaaaacaggccagacagaagcagaggcaggcagatctctgtgagttcaaggccagtttggtttacacacagcattccaggccagtaaattagtgttaaacaaaatagcatggtgccaaacacaaaaagtaatgaaatatgaatattgttagtaagaaagagattcagatctaggccagggaaaatcttataaagaatatggatcacctcagggcctgagaggggtgagggtgagatgggggtgtggacttcaggcatatacaagcagccatagaagttaaatatttaggggccagagcaaagagtagtgtgcttgggtatgtagtgaggggaaaatgggtttgggagcatcctgaaaatgctggcattctcacaagagcaaatcagaagccctggtcaaatatggagccagggagaagcagaggagttcagagctatgaagcaatactaatccttcatgtgcttgaagacaagtagtgccttttcctccagcagcctcctctcagggcatgcagcctaagtgctctgttctttgagcttcaggtccccgaggctgcttaatgctgtgctgtttacacacatctcaattcgtggtgagttatatacagcatgacatggcctttggcgctgagagaagaagtctttaaaagcacacagggtagatgaggaagagaaaccaaaaggaatagagctgcagctcctcccctttccagacctttctgggtctccagttacaagcaaggtctgtcctgctggtgtaatgagctctcttgatgagcaggtggattcctccagaaactgagttgctttgcaccctggtttggaaatgtcttgtcctttaaaagaagcacaagcaagactttataggacactctggttatggataatatttgaaatttgctgattttcggttgataaccaactgaccttttatgcaccttacagttcaacagaaaccagtgacctccagtagtccttacctctctgcttgacagcagaaggctgtgctttgtgagctactcacaactaatggtcagtcctactaccatctttgatatccgtgcctgtctgtaacaggcatatatgaaacaaccatggctgtaagggctgaggaagcacaatcggtcaagatactgaaaaagctgctatgaaaatgagccagcctaagtaattcacacacaccacacttcatggttcttcatggtttttgagccaagatttagaagtcatacatcaaaatgtgggcctgggtggtttttagaatttgggggaatgattcactgttctgtgatccgcacattgctggcttacataaatgatcaatatgggaccatctttttccccttagaattattagaggtgtatggatggaaatcaaatgttgaagttggattcctgagggaggtaaggtagcagagcagttaaaatgagtctgggatctggggtaagtcaccaatcaaccatgtcatatctggtgaagtcagctaaattcccctgcctccatttccttagaatagatgatggtagatctaacttcttaagagttcttcactaaatcagtcaaattcctggtaccatatagaggctcattaaactatagttgttattacttatgtgagaaacaacatgcttgaacaacctagcccaagtttccatatccagaagtacaccagacattcactgcaaagcattgcttttctcatcaatatttactgagggtcctgtgttacctagcttccctccatggtttagtttattatcatctgggatccgttaacatattagtaaagagtccttgttgagtcgttgagaacaaaaccaagcaatacatttcctattcttgggagactcaacaaacccaatctagaacttgactggggtacttcttgactgtatcatccttctagaatacatcacaagtccccattctgcctgtagagtgtgtggttagtgagtaaatgagttatttaaattatctatggagatgttgaatcctttgaagggacaatcttcaacttaacaatttaactaaatttttaattcaaattagcaaacagttctaaaaataaacccagtcccagatttaaaaaaaattagaaggcccttgcagtggagaatttatgcttctggaagtagactcttgtcaaggaattcattagctcagtgtgtgagtgaaaagcaacagaaacctgcccccttcccaaccataagcagcccacgtttacagtccctcgtccccatgtacttcttggctgtgaatcatttctttgctcagtacttcctaagatgtacctttctgtaagaaacatgaaaaagatgttgccaagacttcaaagcaagcgtaatgacggcagttcttaggggaagcaggatgtgcttagagagaaatggcaacaaagaatgttctctgctcttcggtggatggtacttgtggaaggatgatttgcttatttgttcatttatttatttgaaattttttattcttctctcatacattatatcctgacttcaggctctgtgtttctcccttcagtttctgtgagcctctatgagccctactgagttgattctgtgtaccatgtgctcatgttcttgtggtatcttcgacattggttctaactcaaagaatatagtcacaattgtgtttcttgatttgtttgctcctgacatttaagctgagatcctccctttcaaagatagtgattcttacaaaatgtaacatcaaactcacctgagtttacttggttttattcttatttttagtggggtacttttctccctgagtcattctggcaggttcctatgggatatagaaccattaagattgttgctttcaatctcttctgccagaaacatggctgagttacattattggatcttacccagcacattaatagcttacacccatgtaaagccctatgctttgaagtccttgtccttcaataatatttttcaagaactcctgatggatttgagcagaaagctcattacctatcttaagaaaaaagccaaggctggggagataggtagctcagttggtaaagtgctcagggcacatgaagacctggcttcaatccccaggactcaaatgaaaagctgattgggtagcttacacttgtagttctcatgatgaggaggtagagacaggaggatcccgaggactcactgaccagctggctaaccagcctctggctcactcgatgagctctattgagaaaccaagtagatggcttttaaggaactacaccagaggctgatgacctcacacacatatacataacttcacatgctcatgagcaccttcacaaacacacacccatctattctcacatgaagttaaagcaaaggttttctaacagataccaggacacagtgtaatatcccaaagtcatgtcagccaagtagggtacaaggaagtagggcttccctgggtcagtatacattgaatgggttttggggatgatgattgctatatttcggtttaacttgttcctttctgaggatctctggcatccaaatcatataacaattaaagcattctctggataagcagctgagagatcaaatttgtgattaaggccatggttcacctaagtgctaaaccagctatgctttgccatctgattgccacatagcaccgtgtaactctgacacaggaaggcatgtctgctggtattattcattcagatgtcttatggtagcatggagaaagcacagaatgtagatttgagcagaagccctcctgaatgaaacaacagaagtgacagtttagtaaagtttgtgtccaaatcccaagcattgtaccaaagagtgctgcctttgctggcttagattctttgcatgtggatctgtttgcaagctcagtcccccagagagaaagtctgagctgtctttgtactaaattaaacattggttttctccttgggaacctgatcttccataggccaggcaacaatatctttctgagagagccccagccaaccatttcccgcaggaacacactggctggggagccttttcacttgctgtcttctctgcttatgtgtgtgcggtgcaggggagttgttttgtctaactagatccgaggccctcagagcagactcactctgtaatccctgctataaggttgtcctatgctgcttaacatataataaatgaaaatgtctagaccagcagccagattatgcaggattacatgctcacgggggaaggagtttcttcacccctctcccctaaatcctgtgctcacaacatgcaagggagtgtgtcacaaacagaagctgtctccttccctgcttcatctcagctccatcctgcctgtccccctagagggctagttcatgtcactctaaaaataggccactattctacaatttatagacctgtatgagcctgcagagagaaaacagaccaaactctcttttcatagatgaggaaattaaagcttgttaaaatacaaacagataaacaacaacattagctaggggaagtgccaagggatttttcacatctgttccaggatatacaaagtgtcatttatcaggattactttataaacctatgagaaaggtaagtgtagatcattcacataacattgaaattgtgctgcaggatgcgcatgggtattggaatctttctttaggatagtttttaaatgatcatgcaatctcttcaatgtcacatagccctttcaagtggtgtgttcccactcatacagacaatggctgctatttcctcttttaaatattatatggcctcttgacttgctttaaccaattatatgtacaaaaataacatcatgctacacctgaggatgtccttgaggtagtccacttggatcccagacccaaaaagctgggcctgcctggaggtttaatatccacattcggagaaaccaaaacacccttcctgcaaagggaccactgtcctcatgtaagcaactcctcccccatctcagtataatctgctagaaaaccactctacacagcagccctgcagagccctgaggaattctgcctggttgtactgagtcattaagtttggggtggcttataaggtcacataggttgactgatcagtgctagaaaccaataaagggcaatagttgctggctttagccatgtttctgaagattcattgctttaagataatactgtctctctctctctccctccctctccaaaagttatggggttatactagacaatacttgaggaaactgaggtgtaatacactgtgttcaagctcttggcacagactaacagacactaatttccttgctttgtacttactttctcttttagcccccttcctttaacaactcactttcctttcatgtgcacccaaattctcccaggcttccccagctgactgttccttggaacatgatttttttccccctacttctagatgatgggttcttattcctcctaactaccagatttccagcattcttgttccactccaggggtcacatctgccttcagtagtctactcttaaaatagaaaagggttaacctcataaagatgtcactccccttgtactgttatgttgcccttgggagactcagacagcatagcaagtatatatggccagcgtaattgcattcgatccttgaggtcacagaagactttgtgagctgggacgaaatacagggaagaaacagattccatctttaaaaacattctttcaaattctcactcgcttttctgtagaaaatgaccctaccctgcatgtctcgttttggttcttatcttaccttcacaatacatgaataaacaaatgaaagaatagttgggatatcatattagacttccatgctgtgattattatgaaatatcaggaatctagcctaggaagcaggcctgaggtcctgggataccagctaacagtgcaacttaagtccttcattacattggtattaactttcttcctcttctttttcgattattgttattttttcttataattgtcattttaaaacaagaacctgttgaatggcttgggttaccactgaggcctgttttggtatgatacaattttgaatatttcccatatatgtggcttttatttcttagactttagtatctccttaaataaatctattaaacaatcaacaaagcattaataaatatggatatgatttgctttttttaaaatatattggaaaagaaaatccaaagtaaccttagccacaagttacagccatgttggaaggggcagagggcaacagtattcatttatcagtacctgcaggcaggggtagacagactaaaaaccacggttgtgggaatagggctttgtttaatttgcttgtagctggagccctgattcctccattccacacctaccaactacacttgcagcatttctgtggagtaagaaatgttcccaaattgagtaccatcactaaatgatagcaggcaacaaagaatataaaacaaaaagtaattccttctcaggagttgacgagtgttcaactgctcacatcagtcccccatctgtttgtctctcccgcatagacacataacaattgaaaagtgcagattgatggatgggattttatccttgtcaccacttcatctttaaaatatgtttcctctttaaaggggaactataaaggagagtcacagagaaattggttgggggatgggatttagctgactgctatttttttttccttatcactaaaaccctaagcagggcataatcacccatttccctagggcagccctaagccctgagaattcggctccgtttggggatttaatttctttggaaagaagaaataagcaggatcggctccaatgcaccaacaaaggaaacatttccccaaaatattaaatggagaagacctcatcacacccagaagcagctagagcacagtctcttccgcatctctctgactttcagaatcttgggggtctttgaatcatgtctgatcctccgggacagctgggtgcatttcttgacaaagcaatgtgtaactggaatgaatggagaagcatcctttgattgtggttgtcatactgctcattgaagggcttcattgtctgtcaggttgcagtcacagggatatcaacttttttcccagttgcttctaaatagcctggaatttcttttattatgatttgtaggtgaaaatatcttggtattatgctgtgcaggtgacttttctttcttgaatcctgaagtaatggatattaagttgcctttcttctccaatagtttctgttctacatttgctgagaaaatgtacccctagtctatctgtctgtctatctgtctgtctgtctgtgtgtgtgtctctctctctcatgtgcgtgcatgcactcccgcatgcgcatgcacacacacacagaaacactgtgtggttagaatgactttttaatatatggacacaagttggctatgtgagtgattttcagagaaaactagaaacaaagaaatgagtccaagagtatttaaaagaaattgatgcaaaagccaaatgcatactggtttatagaaactaggaaaagataatgttatactaaatagagtgaaagaaattctcttggctggttcctccaaccaggcctccaccatcatggttctcttgggccagtcacccatgtccccatctgcaacccagttgaatctggctccttagtactctgcctggctgagttattgttgtcatagaaaagtcagctccagtgtcactttctaggtagacctcaatggttgtctgaaaagatcagacatatggctgatctctcctcaactccagcatcctttatcctcttacagagtttaattctccttacaacttttaccaaggaatttattttattactatctgaattcctagtttctttgtgtgtctcttctctttccccagtggagctataaactccatgagaccagaggtcatgacagtcttgtttacaataagcatcccaggcccttaattcctggagctatacagtaacctctatagttatcatatgtggctatcagagatggaagaataagaagaggaggaggagagattatccaaggtcacacatacttagtaatgaattaatgaatttaacataactgtacctaggacacacacacacacacacacacacacacacacacacagagagagagagagagagagagagagagaataagaacaatgatgcagttaaaagcaggatgccactgaaaaattcagagggtagataatatcttaaatgttttgccatgttcaaattctaatcttgtctcttatgagaggatagctttggtgtaggtaaaagggtaaatccacagatgttggatacttaccatgtgttgggccctcagaccaatcatctcattggacagagcttacattttaatgggaagacaggaagtcatctattgaaggaacatggcaaacctaatgttgcaacatacagcaccttattccttagttgaatgaagtagctgtctgaagacagatttgggttaattaaaggaaagcaaatctgaaaaacattctaaaaagtgagagccacaagaaaaacgtaagtcctcacagttgaaggactcctttggcacagaagctcagctctggtggtgtgttctccatcagtcttcctgtcccagcctatgtgctactttcacctgtgtgaatggatgctggtcttgatgttttggtgctttaaaactattgcaggcctttaattggaagtcactgatggtcaagaactgaagagaaaatgctgatggtttctttaatggagaataccattctgctttagacttcgaaatcttgggtggggtgttgctcactattagagtcactgaccaatgctaaggagatggggtttgatcttcagcattgaaaaagaaaaggaaggaagggtaggagtgaggaatagatggaggaagggagggaaggaaggagggagggagggaggagggaagggaggaaggcaagaaggaaggaatgaaggaaagaaggagtaaaaagaagggaagaaaaagcaatagaattggaaaagcaatggttgggaaattagtaccaggaccacagggggacagtgtcatagccagttgtcaggaagtgtgcagaagtgatggagaaagtccttctgtatatatatttctcttattggttgatgaataaaacactgtttggccaatagaggcaggaagataaggtgggactaggagaattctgggaaaggtaggcagggagagacggcgaggcgacaccatgtagagactggaatatagtatgcacccaacattctctgttaagataaggccatgtaaaaacacatggattaatagttatggataaataattaagacagagctagtcaataagaagccctatccatgggccaacagtttagtaattaatatagcatctctgtgtgcccatttgggactgaagcagtggctttttttccagcattggctggaaagaaaactccagcaacacagaagcactggatgtgatcataatagtacctaatgtgcataccatccaccttttcctcacagagaccccatgctatcagtaaactgtcaacatagctatctgtacattacaaatcagaaacatacttggagaagctaagaaaaaatactgttgtttaaatatcatctgtgctgcatattgactgcaggtccacacatcatttccacatattctctgtggaattgattttaagtgggaagggcttagacctgtttgctctaagtgcctgccaacctgttgtgccatgcagggcacactggcagcaaccttgagcagttcagttgcaaatccttaactgcattcacagctatattgggatattgaaggtctctggctctcacaagctcacccacacagaacttgaagccaatgactcttctagaaagaatgacaatcatgaatggaatgaggatgttggactctcagccacaccaaatcaagaataaaggatgctaaaagcgagggtcttcttcttcttcttcttcttcttcttcttcttcttcttcttcttcttcttcttcttcttctcctcctctcctcctcctcctccccctcttcctcctcctccttctttcaatcactaatttgtaagaaaacgaggcaaggtgagaatatggtttaatttttgaaataattccaaagagtccattggcaggttgtggataaggggtacacagtcattttgaagcagaaatcaagggaaattcttcacgggaaccgaaactggtcttttccattttcttctgtgatgtggctctttttttgaataaagatcttagatgggacttacaagaaagaataatagttcttgctcaggggtgacttttgtaagcattttagatccaagtggaaaatacattcctctaagttgatgtttttttttaatttttttatttgtttgccaaaagaaaatgggagtggtgctcatataatcaatgagatttttgatggaggtagagggatgttttatttatctctgattcaggttccactgtagtgtcagacttctagcaaacatatatcagtaaatgttgaactatactggcaaatatacaaacacaaacttttttgtgtgtgcaactccatgcatgtatgagtgtgcatatgtgttgaggctggaggaccccttagttgtggttcctcagctatcattcaccttctttttttatttgttttttttttttgtggatttgcagttttgaaacagggtctttcactatcctgggactcatcaagtatgctaggctacctagccagggagccgtagatcctcctgtttctacctctgcagtaatggaattccaaatacttatcatctaccctagctttttatacatggattctggggactaacctcaggcctttgtgtctgattaaaccatctcaccagcatgagtttgtttgtttagtttggggttttttgtttgcttgagttttcaagttcccctgtattgaatgcagggttctatactgtggcttagaagcatgttcaaagtgaatatgttctatggtttttgtcagattcccaaagtgctccaagggccaaagaactggaagtcaaggcttggggtaggagaaagaagaactggaggaatcctggagtagggttatcactccctccacagggcagcaagctccaggagagctgtggagttggttctctgtctgtgttctgctcgttccagtttcaggaatctgtgcaaaaatcaaaagcaaagaaagcctaattctgggccttctttgttgtgttatctatctgggcaccttttctatgctttctaaaaacctgcagttcctgggtcctctcttgttttcattgttttctgcagttagagccctaggcaggcctttcttaggcttgctttctaagtgacttctcacatttgtaggcttcctgccctctcatcttcacccctgcatttaaatggtgtctttccctgtcttcctggggaccttcttagtgaacatgctaaggctggcttgcagcttttcccgcacctcggcacacggactgttcttattagctgtacaccccaggctgctggagttcctatcttggcagtggaccatcaaacaccctattttttaagagtctctaacttagttgtaaacacgtgctgtgactgggctctctgtctctttgctcgtatttaccaagtgggttagctgttgaaaagttgttatgatgaaaaaattaaaaaataaaagttcagtctccaggattgttattttccatttgtctaactcaaaaccgtatgacttcacaaagaggaaagaaagaaagaaagaaagaaagaaagaaagaaagaaagaaagaaagaagaaaaaagcaattggcatttagtttcttcatttgatggtctagtcatattggtaatttgagggggaagaatggacccgctggatcattttactctgacaaatgccaatcaaacatgcatgtggagggggtagtatttgctgcacatgtttaaatgattggaactgctcaaagaagtcaatctagtttgttgtgtaaactgtttatgctcttaaaatcatgtgtatttataataaaaacattctatagatgtatttaagtttttaagacttttcatgtcccattaggaggacttaatctctaccccaaattttctgcatttgcttacacatccattcatggactgttatctctgaggacctcacacaatatcaggatttttgtgaagaaaagatatctatttctttgatccctttaaggaatgtagggtaacaaaacacatcttaatcttttgaggagactgtaacccatggcttagagtaggagattcaggaacttaaatgttaagagatcagactctgactttttcctcttgtgatttaagtaagattctgggagcaatgctgggtgaattcctcctcatcacaggaggaacactggttttcctcagggttagcatttcaccaaaggtggagcatcagaggaggacatctaccctcagagaggttgtcacacctgtaagaggagtgtgtgtgtgtttggggaagggggtggttacgaataggccttgccctatgggctgccactcacttaataggtaggttggcctggaagctctcaagctgggtgacaagtgaatctcttcatcttggatcactttgggaggcttctggcttcagtgttgattttgcccctccagtaaaataatgttttcctccttccatcacaggcagaggagtacaaacacaggccagcacatggttcccacatactttctttcccagatggctgtgctttgaacatgtttgctttacagtctttgtcatgtaatgtgtggtcttattgtcatgcttcctggtctagcttttaaatctctctccttatcaaatgctttcactacccatgctggatagttggttttccattataagaaacccagaaatgtgggactgaagagaagactgagagggtgaaatacttatcatataatcatgataaccgaaatttggaatttctagaacccaggtaaagtcagatgcagtgtttcacatctgtaaccccagtgtccccatggcaagataggagggagagacaggaagagtccttgcaagtttctgggccagctcacaccatacttacaggaccatgtacaatctctctctctttctctccctctctctctctctctctctctctctctctctctctcctttcctctccctatccctccatcttcacctgtctctcttctaattaaagtattaatgaattgaagaccgtcacagaaggtaggtaagaaaaggggagaaacacaactaagccccaaatgtgaatggcccattctgccctaagttacatctgctcctgggggagatggggtgttctatatgtgtctttcctagaaacaacagcatgcttcttcctggagccgtcatgagtttgacatcacaagagtgctagaaccccactagaagtatactcttgggggtgttgaacaaagttagtgtgggactgacatagcgtgtacaaatgttctttctctcggccttctagtgtgccaccccactgttgactggaatcatgagctatacaatggaacgttaaatggcaggaggcataagccagtcaataaagcaaggagctcatgccacttcattctatttcctcctttgttaaggtgcaagtattttatttatttgtttgtttatgttttggtttttcgagacagggtttctctgtgtaacagtcctggccattctggaactcgccttatagaccaggctggccgcaaactcacagagatctgcctgactctgcctctcgagtgttgggatcaaaggtgtgtgccacccaccacctggcttattttaaaaaatattttattaattctttgcaaatttaatacaataattatgatcatgttttccccaataaactcctcctgaatgtagttaagctagtcagcattctagcttgaagtggaaaggtgctcatgagccccactctaattgaggagctatggacagatgatagcttctagagggtggagaggctgttttcttttagggtgtagcttttagtaggttgaccattctccagtgggtggccccatattcccaggagtacatgaagagcacaaattagaatcagtaggcaattaaacaaaaataaaaagaggacatagagtagtttatagatataacctaacccataaaacacctatgtatccatgcagtcttaatctatctctcatctcattgccagtcgtgagaatgtagctgcaacttcttcaggaacaggtagcatttcccactaagcaatgctccttgcatggtggctgcttcttgttgccgttgttggtttttgttgttcttcttttatcgtcatcatcaccattattattcctcctccttccgctcctttttcagtatccattttgttattttaccaaatttcaacatctcaagtgattccttctgatagctagacttctgtgtacagaatctgtcttgctcacaggctttatggcaattatatcaacacaaacattatctagttatttgggggggttatggtatttccttcactatagaacttgagttctaaacacttaaaggagagtcagaattaattgtgaccagggagatttttttcctgaaagggtggcagggcacaattccacacatgtgtgttgtcacatctttgcaaagaaatagattcttctgtggtaggttgtaaaaatatgtctgatgttttaaaagcttttagggggaagaacttaaaaagttgagctcttaaaattctctgacagcaagatttgttgttgttattcaaaagtcagattccagttgacatatcaacaggatttgttaactgtgttagttatctattgccacatagcacacatttattgtcctgcacaatttctgcagctcaggaactggggaactgctttgttgggttgggctagcccaggctagatcatgggatttcagcccagccattggctaggattctagtcacctcaaagcttgactgaggatggaaaatctgattccaagttctcacgcacagttgttggcaggagagctgcttctcagggaatgctggcctcccttccagcattgacctctgtgtaggctgctgagtcctaaagtcccagtgtcaggctgctctcctcagagttgttgattcaagagggacaaccccaaagggaagctgttgtgcttatccaactccttcagaagtggcagacatcttctgcatatacattggtcacatagactaaaacctgtatatttcacaagaacatgaatcctagaaaacaggacacttgggggccatcttggaagttatttaaccattgatgaacaaacactggcgaaaaatctaggttatattatattatattatattatactattgaagacaggtttgtccctgacttgcatagtttgaccatttcttccttttgtagatgagtctcgtcacctctgtactaagcactttctaaatacttaggttagatcacagcataaaacaaatactttccccacagtgagtcttacatgattttatattctgcttttcatgtaacaagccccacaggtgggtgggcctatgccactaaaataagtaagtggaccttaaaccattgttttagatttgacttgtccttgaccctcttaaacaggaaacagtggttgccactttatctactagaataggatagatttcttcttcctgttttttgttttttaagaacatagttgtagtaatataatctctctggtaactgctttcttctgttcgttaattctctcaaatgatagactccctatctctgatggccaaagtgtggaagtaaagaatttcaaagaattaagaaacatgaagcacattactcaagaattgcagtgtagggtttggaccatctggtgtttgagacataattgacttgctaacttttgactctgctgcccagtatgtgttgttgactccactgagcctctgtactgctgtttctaaactgctagcaacaccaacacctgtcttggagtagtgcctagtcacttatctcaggatctggtgtgtacatgcagttgaattctatgtacttttgcattgttctgactcattactaaggctcatcactaatgttgctgtcacaccttacctcctagtgtaacccaagtgccctggatgataacaggcatatataagttcactcccaaagcagcctctcccaattctatcatcagccagagctattattgctttttgtattcatgataaattggaagaacaacttcatctgggattcatgaacccatggtttctgatggatcatcaccagcttagcactgagatacatatgagtgctttgagatctacctgctggcatctcactgaaggagtttgtgctgtgtatgttgcttcaggctccagggcgggctgggagtaggtgtgaaggactctggagaagaaagacacacatacacagtcaggggtgtctctctccttttgtcagttttcacacttgatctggaaagtccatcatttcccacagggcagcactttgccttcctgaggtagagtagctctcatgtctgtactgagtcactttcttctctggaatgacaccactaccacctgagaaaccagcagtgagaatgggaggactttgggaaccaccaacctcagaaacccagcaggcctgattcttggataaggagtgaggtatgacttgaagacacctgatgtctggaagctctgtgtacctcatacacaccctcatttcaccaacctccaaagggcaggaatgtatataccggaaacaccttgggtatgtaaggatgtgaacaaatgtagtgaatttccaggcagcagtgggctctggactggtttaaaaatgatagcatttctaaaaatacaagaagggacggggggtggggggtggggagatgttttagagttggactaacctgacactagttgtctacaggacctggaaggggcagttatttcttgacctatccaagcctaggtgtatatatgatggaaaattgcctgcctgagatatcatgtaaaacatgcaacaatatatttcaaaacaacatcctaggaaactgcccttttatgctctatcaattttctaaattaatcagctcagaatacagaatcgctttaattaggaaaatatctttagttccatggtttatttcattagaatttattgatgaggccactggtaaggaatgtgcttaataatctgagtcccacttgagaaattgggggtcaggaattctggaatgggatcctgataacagatgccttctcatttgaatttggagacacagcttgtggggagactctcagacttgggaggtttggcagtcactttggcttaatcattaggtgtctgtgggatcttttagctttgaaagctctgcattgtcaatgtcataaagccgaagtgctcctaggggatttccccatgctttctgagacaccaaagtgagattagacaaggtgcaagccccattctgtggaaaccgtgtcagtcagctttgtgtgtgacctaaatggaacaatttaccactttcccatgcatcgctttagaatgcatgcagggacagggcacctggggatattcgtggaatgcaggcctgaagctgaaagacaagtaaaaccagagggcttgggcagagaagaataccaaggtactgagcacttaactcccaagagttactggctgtccaccagttgtggaggacttggccctgacaaaagtctcactgccttccataagtttggggccattgtctcagttccatctgtaagatgtggcttgaagtctttgtttggttactatcttgacttttgaggatcccatctcaggttcctgctccacttaccatgttcctcatctccatctccattctagtggctgtgtccatcatctccatctccattctagtagctgtgtccatcatcttcatctccattctagtagctgtgtccatcatctccattctagtggatgtgtccatcatctccattctagtggctgtgtccatcatcttcatctccattctagtgtctgtgtctatcaatcatctccatctccatctccattctagtgccttcctagagtatcactaccagttgccttcttacatggaattgtggtcatcacatctgtgctgagaacccacacagctcctagtgtttcacttagaataaacatgactctttaccaagttaggaaggcctgtgagtattaggctctgtctcctttggagggggggatggggtgctgggatttgaacccagtacccacaatgctaagcacacatactaagcaaacactctctcactgagcctcatccctaggcattttgttatacattttaatttgagacagggtctcactaagtagctcagccttccatgaacttgctttgtatcctaaacaggccttaaattgtgatcctcctgcctcctactccatgggtgatgggacttcagggctacacctctgaacctagctctgcttccctcacacccccattttctcactgtctactggctgctaacctcatgtgggtcttataactttcaagtgagtcaggacctttctttgcatagatccctctactgtgtttttttttttctcccacacagtacacaccacacataccacctggctggctgccacatactgtcagatgtcagcttaaatgaaaggccagccactagacatcccctctatagggtttccctctttctttttcttttctttttttaagcatagcacttactgcaactttcactgtctgtgtctatttaccactaccaccccattttagtggtgtttctttcatcatataaactccaccttgtggtcttcaccttgtgtctgtggtacacccagagttttgaacatgttggttgcttctgaatgactgtacaaataccctggtttgctctactccagaaggaccaacaggaatatacatttctgctttctgagataaattcatctttttatactattcaacagaatattcacagtgcctcacttgtccaaactataattcaagaaacatttgattctttcttttctgaagagttgaaggatcacatgtggcttgagtggcagcaggacttcaggaatgtgtccctgtgataggaaacctgcacagtgaaccttcctgtttcttttggctactttaatggttgaaatccatccactgctccagttggccacagataagaaatgaaatgtgaagttgggttgtatggatctgagaagagtttcccacagcctgccctcctgcctgggtacagaggactagttgtatagccctgctcagacaggtctcagaactaaatgtccatgaggacaggccagattgctgtcttctctactgagccttattgtggacagggagcaggagactgaaccaagctgaccaatgagagtggatgaatgaaggcctcaggaggacaaactaagtgcctcagaatttctgaggccaacaagaccaaaacatcaaagagtgtatgagagggtctatgatttcagtggaaactggatcccaggacataaggactaaatatatttaaagtttgaaggaaataacattaggataaatgcaacaaacacatgagaaatccaatcccaatagataggtagagtgaaaatatgtgtgaaattaattaagtaaaataagaatgtgttttatagggaagcatatcagattgcttagggatttcttgaagataccatttccagcctttgaagttaacaaaaacaaatgtcctcgcacacaccattcccttctccctttttttttcttatcctttgaataaattctactgtgtccacacaccttaccatgggtatcacagcaggtcagaactgaccaaattctctgggaatgaagtctgtctggctcagaacctcttcatcagtacactcctcagaactgagggaagcagcccagacagatgagctttaattagggacctcaatctatagatctcagaagcctccctagtgcctactgtaacatcaaactttacagtcaacaccttgttgctttgattgatttactaattgtggccaagaatgcacttcctcactggctgccatgacacccactagctttgttagtgctctagctggtagtgaagcccacaggggacccagatggaacaaggtcttccctgccaatctcatggcaactgcatctataggcccaatgaagacaaagctgtttctgcatcaaatattttttctggtctgagtgtaaaactagacttctatgcagaaaatggaatggtgtttacacagagcaggaactctggagacctcttggaaagtgtgggaagagttggaataatctacccctggccctaattccctgtgtcagggtatcctagcagtataccctgaagtgaagagaaggaggtgacaatgccactgtgtaaaatgtccattgtacctctcagatacagagctggtcaccaactggcaggaaggatgttgttattgtctgggagtgggtgaggcctgctgaaaaaaatctgtggtatgaggaaatgtaaaacaagtttgtcttgttcttattaggagaggggatattgagccgatttacaaactgccaaaccactactcagagttggaagtattgtccaaaagatcatagtggcacaacctagaaggctgcagatttataaacagcagcttcagtgctcacctggggcacaggctaagaggccacctttgactcttgcctctttttccatctttaaatgtcatcatctggagttagatttaagcaagctctcagcagaactagccttgggaggccttagaagattgcccttgctttagccattttacctgagatgactcccttttctttctttgtttatttaataattaaataagtgatgatataatatgatggtagtgctggagactgaagccagggcctcatgtatactatgcaaggcttctacctctgagatacattctcagccctcccgttctttggtcatcaccctgtcttctcccaaggattcaacaaaatttaaagatggaactatctgggctatggggatgactcaattaataaaaagcctactgtgcatgcctgaagatctgagttcaaccccctcatcggtgcaaaaagcaaaggatggcagtgggcacctaatcccacctccagggaggtggaagccgcagaaccccgagggctcactagccagtcagtctcaccatctggtagctgcaggtttactgagagacctggcctcaaaaacaaggtaaaaaatgaagaagaacctctggctgccacacacaccatacacatatgcaagcatacccccacacaaacacacacacacacacacacacacacacacacacacacacaatgaggattttatgtgaatgaatgagaccttggttgaggaaaggaatgtggagaaatgtgtgcggtagcgggtggagaagtggttgtgttcctggggacttggaattatgggtaatgagctaattactgtccccctctttgctcagggtgaagagctgggatttccatttttagcagtttctcaggtgggtgctgatgctggggccctttggaatttgactagtttgattatgaccgaagctctgtaatttggtagtcaaggatcatgactgtgcagaacagctgtactctagctcattcacacaccacacagacatgatgatgatttgatgggcatgagcctgagctgatgtgcacaaaaatatctagcatagtgctaacttatctaagcactcagtttcttaattacacattattactctcttgatttgtgcctacgtgggaaagtacaaattttaggtgttttcttgaaggagggaggattgcatgtagctgttataatattacacaagctcacaatctagttcctattccaatacagccatgatattgatttctgggtcatggaactatacttaaagatccggaattagtttctgacaaaactctttagtactaatttttgcagcagataaaagacaacatggtcacagataatgatgattgcaattgtatacccttaataccacaaacttgtacatttaaatggtaaactttattttgtctattctatcacaatttttaaaagtagcaggtagaatgaagattagattctgcctcccctttagtggtctcctatagtggccgtcattgtagcaaatagctttgcaactattgttcaaattatcctcttagtttgaaaagggttagaccatgacaacataccttgcatagagcacattctaaatgagtactgtgggctcaacactgcagcacaaatctgttgtgagaatgaatctggtggtgtttcaagttcccagtgctggattagatttcattctcatacacaaaccccaatctttggattctcatccagtgattaaacaagaaatttcccctaagcacttcacctgatgataagtccaagtaagttgggttccacggcttataagtaagccccataaacactgatgcaccttttccttagcaacattgtacatgcaagaccgtgaagccttctgcatgggatttggaaaaatcaacagatgttagatttgccctcagccatgagaatcccagctaggtactgaggtgtctagcaatgttctccagcctttgcttcccctgatgcctgctccatgaagaagattcttcagattgtgcctctagaattggggaaagatcgagcttcaaggtcagaaacaatctgtgagttacaatgaggttacatgggaaactttacattaaaacctcatggttcatacaaaagaattacactgaattatgattttttcctgtagtggcttcttcctttgttcttgtgactctggagcaggctgcaagtagatgtctatgattttttaaaccatatgaatgatgaggcagagtgtaatagtttgctcatttgctcattctaacaatcatggggaagtcacatgctagagaaagcttctttacacaaaggaaatgggctcagaaaggggtggccattaggttcagattgacatgggcagagcaaagggtcaaattgatgggttgtcttgtttccttttgagaacatctctctatgcagcccagaaaggccttgaacccataattctcttgtcttccaagagctaggtttaccatcctgagcctccatacctgaccatccccagaactttctatagcatatgagatggcatgctctaagccacagggcaaccatattgccaacctaacaacaaggaaagaaagccttatgtgcttcttgctttaataatgtgcttactagaaaagctacccaagaatacatgcttggtgaataggattacattgtctcttttccttcaatacggaacatctctaactcacatatggtattgactgtggctgcttgaatgatggttttgggattccatgtgttctggcagtttcaggtcacattgagtgagatttgacatgcactcatcatgtccaaggtaataaagttaaagaaatggggtcaccgtggcactttcttgtgtaaaatcaatctcaaaggttgtattcatatttttatctcttctaagtagctgacttctacattccaatttcttagtaaaactttaatttttgagacaatatgagttggtgctattttcagagtagaatttactttcaaccacaatcacaacataaacctggccactgttgtgaattctgggctctaaatatgacaggaagtactctccatatccatcctcttacacattttggaaacttaaagagtctggcaccatatctatttggaagatagaatatcataatagttaaggacatgagcattacaaactagagtgtcaggctgagaaggtgtgctgagctcctagtacccacatggtggttcacaactgtttttaactttagtttcagagatatagtgccctctctggcctccttagttaccatgtgtacctgtgatacacatccatacgtgcatgcagaacacttatattcataaattaaaaatagataaatctttaagaatccaagccccaccattaactggacaacaaatgatagtatactaagacctgcctaatggcagcattgctgggaagattctgtgagaaggtagagatggtacctagtcatgtcagacatcatcaccatcactacaccttcatcatcttacatgatagatcccaaggtcttaccgggctggatgcagctatttctgcaaatgtcatgcttataggtaagactgaataaatataactgtgagcagaacaatacatggtaaactaaaagcatgcacttactggcgtctttctaccaaaacatccatggggttaaactggggcagtttggagtactggcctgtgagtgtgaatgaattttcaagtactaaaacccagaggccttccagatctcactattacatcagacacaattgaattactcacctcagtgggagtcacttgctccaaaaccccaaaaatagttgtccagaactttctaaactttgtcgggaaatgtcaataaggacacttggttcttttcctttttcactttttaactctgttttgatgaatttagcaaataattttttatttgattttattctgtgacttgccttgtttgcttatgttgtagcatattctaaagattattttttaatttttaaattatatgtatggcacctatgagtgtaggtgcctgtggaaggcagaagagaccactagattacctggagctagagttatagatgattgttagctgcctaacatgactgctgggaaccaaactctggtcttctgtaagagcagtagatactcttaacttgtgggctatctcttctgtttctgttctgggtctttacagttggacagaagcacacagagcagaagcttatggtacatatgtgcttcactgaattgtacacaaatgagaatcattcatccactgagtatttgctcaatatctagtgtgtgtaagaccacacattagttgtggggtctctgacttcaaagattttagattctattaaggaggaggatgtcttacttagggtttctgctcaccacgaccatgcaactcttataaaggaaaccatttaattgaggtggcttacagtttctgaggttcaatccattattatcatggcaggacatggcaacatgcaggcagacatggtgctggagaaggagctcagagttctctattttgatcctcaggtgacaggaagtaaactctttcactaggtgtagcttcagcataagagacctcaaagccacccctatgatgacatactttctccaacaaggccacacctactccaacaaagccatactcttaatagtgccactccttttgggaccattttcttttaaaccaccacagtggaacaaacacaaggaaactggctttaaaaataagccaaaataacacaataccaaatcatccccctacagagactactttctttagattttccctgagtcaaagaagtgggtatttttcatagcaatggtttggaaagtgtcttttgagaccatcaagcatttctaacctatactgttgttcatttttagttcatgtccaaagtaagtttcttattgttaaagtcatggcatagttataatgattgtttatcataattataatgattgtttagggaaatgattagataatagagaatacaatataatctggtacaaagttgagacgttgatatcagaacttataataacaccataattaaagggagcagaggaagcctgagtggatgtgtgctgttggcatgttcatgccatgtcaaggatcctagtctcagacccatggaaaaatagcaaagcttccccaggtgatactcagagaaatgtcaaagccttcctctgctccatgtgcaggtgttgacagtgtgtacatagaatttccaccatagctttcttccccaaggcgttttttggcctgaagactgctcccctacaggactgctcctactgagaatagctaaccctgcctccttgttcatctgtatgtaataactgcctccttgtttatccatatgtaataaccctgcctccttgtttatctgtatgtaataaccctgcctccttgttcagctctatgtaataaccctgccttccagtttatctgtgtataataatcctgcctacttgtttagctgcatgcaataccctctatgccctgttcaactgtacaaaagaaacactgagctttttttgtggggaggggcaggtccacccaaccctagctacttctgtgttgctgtgtatctatgtttgttttttttccatgtccttgcagccccagtcaggtccgagtccctggagtcctacaacaatatgccacacattcacttaaattctctctgggatagatcttgatggctggtttctagacacataaagtcttgaatgacacagcagttgctcatatgtatgtttagaaggctttaattacatttcagaatctagtcaacaactagagtctcatcccctcctggtttaagacactgcagtatcttagtataatgacttccatacttttcattagtattctatactctttattatatccagtaactccccagagttcattaccctcaaataacacaccctcaaagatgaatccagttgttgggtgatcctacatttttctacagcactgtataaattctggaattgcaaagaagaccacgtattccatggtggtgtgtagacttttgccacaattccagagaggaacaataacacttgaaatcacagggactgtggaaaacccccacccatacctacctatgagtcacagtccatttgttcctttgggcttggtagtatcatggtccagaaatcagactttttgtgagagattatcattgtgggggatttgagggagcccagacactttgagaaaaagctgtcacctcacagatgtcgatcaaatctaaaaagggggtgtaaaggaaaaggttccactttaaagagctccctcctagcccatggctgagacactgtcccccagagcagaactgtcattcttgttggagaacacagctggctgaaagcagtttcaactttgcagactcaggcatgtgtgggagctacagctttaagatggcatgccccccccaacccccaggctgtgcagagcccctgggctggatgtgaatgggtgttttgtatgaaggttgtggttgagccagggccacttggtaatcagggcagcaaggcccattaatcctcaaggaatatactttacatacagccctccctcttctttaaagtgcaaatgtaaggaaaactctcctgctttgaccttactttaagttcagcgctaagaacacaggtatcgccagcactgtctcctttaatatatggtaattagcactcttctccaggctggctgcagcagtaccttcagcttctgggaacggggagcaggagtggggatcagagcaattgtttgctgtgttggttggtgactgtgatgttgccatgggaaagctcaggacttcaggggagtttgtgtttttttgggagagttgccaagcttctgtgacttattacagcaccatgagggagcaggagtgcacagaacagtatcctatatagccccaagggcaggatggctctcatcacaggactctagagggaggggtatttgctttatttaggctcagaagttatcaacagatccagcattttggtagtctatggatttggtcttttagttttggaggagaaccaagtcgattccacatgctcacatccactaaaaagcaaaactgtgtgtgctttacatataaaaaactcttgtgaagaatgtcatgctctcagataaccactccacccacaactgctgctgatctccacgcagcctcaagaaaagcacaagttcacagtatcaactgctttagtttgaaaaagttaagttgattgagaagatttcttttaaataaagtctctagactgcttctcctggacctctgctgatacccgatagttggacatttgaaccccagctttaatacaatacctgatctagacagatgtagatttggaagttcaaccatcactgaaagccaagaattttttgtaggagtcatatgaaagcttaatatctagatttgcataaaagaaaattctggagcttggtgaaagctatgttgccttttcagataataaagctcccctgtcagaggtagttcactcagcacttcaggtctagaccgggtctccactgttctgtgccctgtagacaatgcctacacactctcaggcaatgtcttcattgtgttctgtactatgcagatattgcctagaggttctcttgaagccaagtcttttgaagctttctcatccattccaaagaactcttgaaagaggagagaaattcacaattttcagttttagccctaaacagacaacaatttattacctcttccctcttcaacactggagcctgggagtgtagggtcaacatgaagcttcaaggacagggctctattttctccacaatgtatttaaggtgacaaacttgtaggacatgagtatacataaagagaggcatatttattgctctaaaacatggggacaaagtttccatgggactcctgaaggttcgttttgtatgagcagctcattcactcattggaatcactttctgcagggtttggtgctttgcagtgtcattggttgccaggatggttgtttattttcacccagtttgacctatgagggacagagtgtgcacagagacagatgttttcacctcccgtagttttcagggactaaatttccaagttctggtaacattcagaagagttaatcatgcaagctgtggaaactttttctaacgggcaaatatgtctccttcatgaacaggatgactgagtaggaacttatggattatccaggggccttgagaagtagaccatccattggtgggaattttttccccagagttctttcatttagtagagtttcaagtatattttatgcaggataaaccctgtttgtcctactcattagaagttgaatagactttgaaggatgacacggcatagctttatagtaacagagagttcccaccactcatgaacccacacatgcatgagctccagcatcattagcaccccacaccaactgaaccatgtactccatgtactgtggctactgaacctggattgacacatcatcacagctctgcatttatggcttgctcttagattctgtgggctttgatagctatataacaactctgccctccactgtggcattgtagaatcttttcagtgccctaaaaaccctctgcactctccttgtccagctttccttgtcctttaaagttgggcagtctctgatgtttttattgcatggaacagctggctgcttctctaatgtgcaacaacacacaagcatagagcagctgtctttttttttcctttgaggatccctgagatccttcaggtagagtcacctctcacttcctaagtccatgtcagcccacccacattttaattgcaacacttccatgctggcctctccccctctacttgtcttctattcttttgtcagttaagtttctaaaatacaactctttgtatcatctctctgcttaaaatctttcaatggctctctctgcccacacttgacattcataactttctaactgacccagaaatgtgtggatcacaatgtctggaggactctaaaattttttctggaaacataagcatgatggaagtcagcctgactcctcattctgagagccaagagggagtgttcaacctcagcacaatcaggcccctcctcaaaagaaatcaaggagggcttgcaattccaaggtgcagaatgcgacttctgattggaagaggagatgtgcaggctgaatgtgaaaggggccagtctgtgtctcagcacctgcttctttgtacacaataattgtccctgcatcgtttgtcgatgggagtgttaacacagagcaggagttcctcagtttgttttgtttgtttttgttttccaagatactctgggaagaggtccatcacaacaaggccatgctagctctagcagtctagggtgagaaaggagtcaaggagataggtcacaacttctgcaggtaccaggcaagcttagggcattatttccaacccgcttgggtcccatttggacttatgtgtttggatctgttctttgtgatgctcagttcataacttgtgttctgtctcatcctgcctcatctggagtctggtttggttatacaatcattgctcagacatacccttggcactgaaaagtttcaaaggaggaaagaaaaaaagacctcttcccttttgtttaagaagttctgggacctttgaaatggctccagtggaaaaggtgcttgccaccaatcctgacaacctgagttcagcccccacattgtggaaagagagaagcaactccagcaggtggtcgtctgacctccacatggcatccaggagcacccacatgcacacgtgcatatgcatgtggggacacacacacacacacacacacacacacacgttttaggtgggctattagaaggactgtctcagcagctgctatttcttggtaattttcttcatcaaacctcacagaagcatggttcctacttatcttactttttggtgccaccctaaggaggcattccctgtagtagagatgactgtaattctagaaggtctggtaagggaaagtacatcaacgttattctgatattatatgacattttgatcaacttatgtattggtaaattatgtgaattttgtacaaagttagttcataaaccactatttgtggaaacaattcaaatgccagagaaggaagttccgttgcccgtggaaggtgtgagccatatgctccattctttcaagtagagtcaggaaatgttagcagcagcagaatgtcacaactacatgaacggtcaatgtttaccagacgttcgttttttaagggtccttgaatttattaaaggttggcagagtcttctagaaagcatcttggcaatatctgtcaagagctataataatatctgtgccctttgcctcagaacttcacttctgggaatctttcagaggaaagaatccaaaatatggaaaaagtgatatgtgcaaaaataataagcattgtggaactgcttataatgagaataggagagttagtcttacatgccacaggagaaaatggactggctagcctgggaagccatatacacgttataatgtaagtacaatgatggtgtgcatctgtcttttagttggttgcaggtaatagacacagactttggaagatgagagaaataatttattacaaggacatggtgggggagggctgtataaatccaaacagtctgaataatcaaatgcagagaaagtgaggactcagggcagtgccagttatcctggtaggagatgctgcctcagggcacctccaggggaaagtgctcactttgtagtcagcacaagaagccactttgactgacagccacacacaggagcagggtctcctctggaaatagggatgtatagatgcttagcagggcaaaatagcagatgaacagcccatggtagaatgagttctgtcttcttgttgtgatccacagtcaatatgggtacatgtagaaactatgttatgcagtagacaacaccataagctgacagcatcagaacagtatataccttacctcaatagaaatggcttaacaataaaaatatctcatagggcttttgcaaggattcagcgaagttacatgtaagaaagtacatgcacaattcccagaaccactaaaagtacttttaaaacctaaataaaggctgcaagtttaaggaatgaggttacaatagttctttgatgtttattttgtagccaacaaagattttctaggctatacatattggcaggtgaaactaattgtaaaaatgtgtgaatcgtggctccacttagattttctctggcagagctactaatctgtgtaagtaaatttgttatcacccaaatgtattatcgaagtgtgagtccagagaaacacaattcataaagtgactggataatttttccagcttttgatttgttattacatcttctgctatggtgtgtaaattgtaaattaatttagagcccttaaaagatgtaatgtataagaacatatacatatatatatatgtttattatgtagaaactgtgttatgcagtatacaacaccatgagctgacagcatcagaacaaaatataccttacctcaatagaaatggcttatttattatgtatgtatctatattaaacccaggtgatggccagagaaatatattgtttgttcatatcaattcatcatggatcatccaactcccaagaggcatttagctttagcactcccacagactggaatgttgaggcaactgtggtccatgtagacagtggctctgttctggagtctatcaacaatctcaagggtgagtcacccacagagggtgaggaggctgaggagaggcaggcatcctcggtgaacatacaaagctctctctccagccacacgctactctatatgcctcctaattttatgtcctttatgcttccaatcatcttgctctactgtcctgatctcgctgaaaaaaaataaaattatagttataataatagaagagacatatttgttttctttttaggagaaatgaatgctttacttatttatggatttttgaaatgggaccttgcaatgtagcagaggctactctcaaacttgtggtgatgctgcttatttctggcccgcctagagctgggactgcaggtacacaccacccatctggcagttcttaactgatatgtgtctgcatttttattagtgaattatttttattattatttatatttgccaacaaatataagaacacatggatcctatccctcccccaggaccttcaatcagttggcattacaatcctttatgccaagaggttcattcaaaagcataaggatagttatactaaatattagcaattatgagtatttactcttggccaaaaataagctaagtagttgaacattatatcatcaaaataatctaaaagagttagtatttattcccattttacagatgaagaaactgaaacttagtggttttggtaagatgtctaagaatcctagtgtcaacaagaaatctaagaactaaagcaagcctgactccacagtccatattttccacagggtctatgcaaatgccctgctggcctttctgcagtcatcatcagccctcttcctgtctgactaaatggccaaagcctccggggtcacgaactctcttatgatgtcacctgatagagggatcctccctctttccagcctcttatcttgcttttgctgacttcccttgcagcctttccactgtgtgcactaaagctcttttccattgtaaataaatgtcctcataccctatttccctgggctgcctttacctcccggcttcagtgcaatggtgattccctatggtgaacatatctttccttttcttgctccccaaggaaatgaggaagtctggtgaacctggaaacagacttagcacttagtatctgtgttaacctagctccaaactacacatcacatcctctcccttagtccctggaattcacatctgtgccttgagatcctcagacaaaagggaggcaacaatttcttcagcaaggcagtctctgggagtagctgattggatgaatcccctggctggcctgtgcaacctctacctccctgcccagtgcctccagttagcactgcatttccagaatcacctcctgggtccactacttggatccaacatctcaaagccctctgctgagacatcagagccaaaacaagagagagaagggattaagaagttggggacctaaagtaggttggtgtggatatcatttcctaattgttttaggggtcaccaaataatatagcaacaaactgcctgccccaccttacccctaaaatgtgcactgttacagttccattgcttatgacaacctttgtcctagctgtccatcattttggggtcccgtccacacagtcccatcttgcttcccatcttagcctctggtcagtttctggcctttcttgtttctgacattagtcattaccacatcatcagtacagatcaacactgccaaaagaaatacttctaacactcttcaccctgggacctcctcatctgcaactgcatcaccctcaaggtgcctaagccttgaactctcagacagataattccagtgtctcattaactccacgtttgtctctaagcccctcttcctccagtctagactgcacccatcttagcctctggtcagttttgagtcttccctcatcttcttgatgataaataccattttacccaaacctcatatctggcagtgttccctgaaagttaccttccctggcactttcagttccctgaacaagggtcaccttgtgctccagtcacctcaagaagtgtcaggacagtggaatcctctgagagtggcacaaaaataaggcatatgtctgaagacacagcagccagactagtaggactaaagggtatcgtccaaatacaccaaagatataaaaaaccacatatttaagaaaatagaacccatggggcatggtggtgcacgcctttaatctcagcactcagaaggcagagccagatgaatctctgtgagttggaggtcagcctggtctacagagcaagtttcaggacagccagggctacacagtgaaatcctatctcaaagattacaaaaagaaggaaggaaggaaggaaggaaggaagggagggagggagggagggagggagggagggagggaggaaggaaaaaccctcattgtttgttaaattattaatctgcaaattggtaattatagagaaaaattgaagtgttaatatcctttttgttcagcaacattgtttccacatatacaagcatcccaggtaaggagaacattttttataaatgctttttaggttctaagaaaagaggaaagtgttaaaaaaaatcactattttgcaaccactaatgaaatagctaattcagacaaagtcatgaattgtatagtagtgttattgtttctctattttctttcctagtatcgggcctttaacccagggcctcacatacactaggcaagtaagtgctctaccacttagcttcatccccgtcaatcatcagtgaattaaatcaccaaatgaaagcttataaatatggtcatagtggctggcttggaacttgctgcatagtggaagatgacattgaacttttaatcctcctgactccaccgccccagtaatttggattatatttgtttcatcatgtctagttgtaacatgaataataaaagacccagacactgatattggagttcaagcttcaagctgaagttcagaaaagcaaagcagctgggctctagctcttacctctcccccaggcctaatgggtctccatcagctctcaagtctcagactgaaagctttcctcagtgtggatatagaacgaatgtctcctactgactccctgctcctgtcttttatacccctttagtgctgtattaaaggtgtgagctataattctcttttagactggttcaatctgtgtagatctgggtggctttgaactcacagagatcagtctgtctgttaatcctgagtactaggattaaaggtgtgtgccaaaacctcctagcttttggttgctggtattaaaggtgtgtgcctggcttctatggattgtggctgactttgctttctgaatcctcagacaagctttaataaaacataaataatatatcactacacccagtttattccgtgctggggattaaacccagggcttcatgcaagctggataagcactctgtcaatcaagccatatatagtcccaaccttaagtcagaacttggagtgggaaaacttctgaaagcccctctagagtttttgctttccccattttcccttcatcagtctgggtccagcccagcctcaagctttggccatgctgaattaggcatcaagtcgataatgcccacagtgcctggcgcgtgtgcaaatgggtggatgatctatgctgctttgacatcggcatcagggaatcacaaggaggattcagactatatgataattctagtggggactgaatgactgagcaaatgagacattgtatctacttttcctcaacttttccatatgtcaagggaacgtaatatagcaatctttgattattcaaggactcacgtgaataccatggctatttccttggcaccaagacaaggggctcttctctatttgcttgttgagatatacaattcactcactttaattttattctccctttgtacctgccctatggacatcctcaaaatttaagcagttaaggggagggggtacttttcagcttattcactgttatccactagatggtcatgaagtcaaattagtaagctgccatctacattcgaatggaatggaatgaaagaaatgagtgtatggcactcagaaagagaaatcttttctgaacatctgaggtatttttgtgtctatgtgtacactgggtatattgggtggactgtaaaatgtatttcctgctgtgagttacagcaaaaaattaaagtttgaaagcaaaatttgggggagtgcgaaacctaccaaaacaatcagacaaagaaacaaagaaaaaacccagtgcattacaaatgaatggccagaagtttacccaagtattagtattggggcagatgcattagcatctatttttaacagcaccattgagtacttctatggtgtatgtacattgatggaggagagagagcagcaggagggagaaggaagagaagacagaggaggagaggggagaaagaaaaagaagagagtgagcgagggaaggagagtgtatgagatttagcagtagtaatttgattgaaccacaatttagtttaatactcagttgggattttattaaatcacatggctacatttttaaattactattgtgccgccagattaagtaatgatgtgggcttctgagcctcttgctttgaaacattccagatgatgggcgttcagttctcagagcctgttgtttgagagaacgcttagtggtcagcagggcaggcacagctccccatgagcagcccagcctgcttgtgcatgcaggaggctatctctaatggacttgatgtgcatctgcacttgcaaagtgacttgaaaaacgccagctcattttttctgtttctatatgtcagaaggtatcttaactctgtccatctgttttaatgggcagtttatttacctgtggctttttattgctctttaaactttcttaaaatattactgttttcagcaaacttggattattgcaaaagtgaattattaatagaaatgaagttttcaggtttcaaacttagttgccaacctaataagactttcatttatatgttgttaactggatttaggtgaaagatgtctgaccaaattttaatagaatgaggtccttggaagacatacttctgcaactgttcttctccagtgttcttctgttcactgacttgaagattcttggcccaacagagaagaattaactttccaaatactttacatcctagcaaattttcttggtgggcaatttaaatgcatagagctttgaaatcagaagctgccttagaatgttttgcaacagaaagcaaagatttagttttcctaaccctcttttcccctatctgtgaaatgatgatgatggtacagctttgtaatgtggataaatcaagaccgtatatgtggaagatagagtacagcccaagcagacttggagagatccaaatgttgctaccgttgattccagaagagacttctcaagactgcgagaagggtctgaggggaaaattttctatgctgggcatccactgagtacctcccaccccagttactaactggtttaattttatgagtggtaaccgacatctgtataattaattgatgaagcacatttgaaaaatcaatgtgttttcttaccgtggtttacctttgatacaagaatatctttgttctaaaggaaaatttcccatcgcagctgtttgtaatgtgtccctagagccaacactgtttgcagaaggaaagtatttaagctaagcattcatctgaattttccttaatgtgaacttcgtctaggaaacagagcttctttggggcaaagagaattaagaaccaacatatcggtcctttgaagaactgtttaaaggtgaaggctaagccacttctgaaaataatacttcaaattcatggcttccctccacagtaatttctgaactttgggcactgagcatttatttgctagctgcagatgagtggtcaggtctgacctgagccgccaaggttaaataaagggctgagaaatcatttagcctaccaccagtctgctagatgctgggtgtttgggacatttaaaattcaccgttatctttctccagtttgcctttctactacacatctgggatctttagggcttccaatttcattcagaacctgtatgtgcctcttcaagagtgattttgttttattttcacttcctcgggtcattaaaatcggctgccatgaaagtagcacgatatctaaaaagaccattactttctttacctcttgtgggctgtaggctgtgtcttccttcaccctgtactttctgagggtcttgcttctggagtcttcagggttggtattttgctgttgttactgttgctgttttcttttagttttctgtgcttccaaccatctctttcagtaaagcctttgacattttaatagttattatcttaatatgcatcagaagagttgaatgacttaacatacttcacatgactagaaatacagcccttatagcctcactccctttcagcacatgaaagaccagagaaaatcacttacttgccgaaagattgggagatttgacaaaattttatattatctcgttacagtgaaggtttctttctttctttttttttcttttttctgttttgttttccttagtctgccatgggctcacacttacattgaacaagtagattcaaagcttaggacttaactatggccaaaattctcagaaactggacggagcattcaatactatgatagtgaaaatgcagacagttatgctttgcaaagaaaaacagagccgttttccttagaaattcctttgaagggacacatgacttgacagttgtttaaaatgttcctctagggctaaagagatgactcagcagttaagagtacttgctgcttttctgggggaactgggttctgttccctggcccaaatggtggccatctgtaactccaggtctaggggatctgacttattcttcccatcttttgggggtacctggcacaaatgtggtccatatacatacatgcaggcaaaaacacttgtacacacagaataaaaattttaaaatgtcaccctgcctaagttatagagaatttttttcagctgtggtcttcatgaaaacttttgtttaccattagaaagatttgaagaaatcaaatacaaaatacaccatgcataagcagtggttccctctcatgtggctctccagtctgggacttgactctctacttctcctttatcatccagttgtcttccatgagacgccgaccccacttgctttctccacttggttttctaacagacccgtaaactcactctatgctgcttacaaggcatacttgttcacacctgtgtcgactgccatcaagatagttacttgtcaatgtactggaaagagcagaggaacgggaaaattagagtgtcaccatgaaagaatccgattgtctcaagtgtagctgtgaaaaggaaaactccacatggaaaaagaaaggtgggaagaacagcagaagagcacggcctgccctgatttaactgtgctgagcaatgtgagaggcgctgtcaaccatcatgcccatcctacagaatttttaggattaaacgaggacagtcacactacttagactaataatacatggtaaatttaataagcaacaacctgtgcttttaccctacagaaggctcatcttttgtggagtcagcatattcctgcttcccaaaatgtactttcatggccctgcagggtactaaaagcttgtcgctcttccataaggaacatttctcaaactggaccaattccattgtacactgccttggtaacattaagtgtcaccaaatgagaggaaagctctggcttagctacaattgatacaagcacagatgcagcctacaaggtaaacttgcacatggcagtcacacacaggttatatgtcatatacgttgcctctgcagagaggcagtattagcagacaggtgttcctaaagtcctaaaactagcacttttgcctagagtattaaagtaaaggctctcatcttgcctcaagttgtgctgaaaatgcagatctgtgacccagccatccctcccaaagtctagccacagggagttcctgagcaaagatgttataaacttaggtaaggaccatgatgacaagtgaacactctttacaatagcagacataacccatcacagagcctatggctggcagaaatttttctgaatgaaatagtgaggcatgtatttacaaatattggggatgagtggggccacggtggcacatgcctttaatcacagcacttgggaggcagacacaggggatctctgaatttgaggctagcctggtctacagatcaaattccaggacatccaggactacacagagaaaagacacacagatcaaacaaacaaaagatccatcatggatgtatacacaagaggacaaaggaggagtatattaccattatctcattctgaaagattcctaagaggctcgtagtaaaatactatcaataaaaggtaaagcagcaagttcacaagaaagggaagaggaatataatgaaagcaggttaattcacacaaataagatctttctcatctagatatgacgttttctgaaatgtgaagtacatgaaatgcaattaagttccaggcaataaacacaaaaggggggatggggagagaatgggctctattttgtgacttcttttattccacaagaagttaagtttttctgatttcaaaaattagattaactcatctgtgaattgaatactgctacatataaaagtgataatctcaataaggtggagttcaaaaaaagtataaaaaccaaatggctggcgagatggcttagcaggtgatgtttagtgtcaaggctgacaaccttagtttaatccctaggatccacattgtgagaggaaagaactgactcccacaggatgtcctctgacctccacacacttacatactaaataaataagtacataaaatgaaaaaagtgaaaattaaagcaattctttaaaaaaacaaataaagcagagaagaagcctgaaggacagacactgtccagccccatgtgtggcatggattttgggtcttcaacatgactcagtgcagtgctacagttagccaataatagtgattcagaaataaaaagacacaggttggaatgtaagaaggacactctgagaaattagtaatgccactttccagaattctatccagtttatgaaagtaaggaaagccgggagttagggtgaaggaatacacagtatctgcaattttccctaaacaaaatagaatctctttaggacttgtaacaggcacgtgggagaagggtgtgagtgtggttacggtatcctgacatcaatcagatcttgaggaacttggggccgcaccttttccctggccactctgtgcttctgtctgtatgcctaatctagcagtgggctgtctgtggggtaaactgtgttcattttcagtcttgtagaagaatcgggacagcagtagcccagggatttgggcagcagcgccaacattggtattagaagctttgtcgattgatacttaatgagccaagttctccccaacgtcttttctagccaccagggtgccattttgtgcagcagagtgctaaatcagatggttctctgctgggttgaaagagtccctgcaaatccctccaaattcaacttattgcctgagagtcaggaaagccatggggagagtgttacccagcaagtgaacccaggtgtctgaatccaccaaaaatgacctagccatgttccctgtaagataaaataaacccttgccaaggtggggtgcttgcagaggagtccatggccattctctgtcaaaggaagaaaagtacactgcccctgagtgtctgaaagtgagaggagtcggaggcctcaattttcccagattctagttattaatttagttaggatttgtgaccagattccttttaaacattttcagttcttttatatggaaaagaaaactagatagtcagttataaaaatgctcaaaagaggctgggcagttggtggcacacacctttagtccaaacactcgggaggcagaggcaggtgaatctctgtaagttcaaggtcagcctgatctacagccaggacagccagtgatatgcagagaaaccctgtctccaaaaaccaggaaagaaaggaaggaaggaaggaagggagggagggagggagggagggaggaaggaaggaaggaaggaaggaaggaaggaaggaaggaagccagacaagcagaaacaaagaaacagaaagaaaaagaaagaaaagcttgaaagtaagcaaagaaaggagactgccaacctttgactgtctgctgttgacctgctgcatctacagacatgttagacacagagaataaatgtaagacgccgaataacacactctgccaggagccacctgcacaccacacctccctgctccacctgcatttcttactccataaattccctcaaagggtccccaagttagctacacttattaattattgtgaatttaaataaactcctagagatgtctaaggactgtcaacacactacagtgcacccttcagagtgatgcttacagaaatgccggggactcagctgaggagagcagtaggacaagtgagttagaaacgtgagcactgtgtttcaaatctgccaggcatttcatctgtcactgactcactcctgaattctctggtattccacagaccctcaagatgtacctacgaatagaagggtatgctccacgacactcgactctatatatcctctttaattttgccagttggatgcatttatattatatatactctgtacagagacaacagattagtcagaacttatgtgaacagagcagtgttactctcagatctgttcttaggccaggttttagtgcatgttctagcttctcctagcgattcccaccattctgctgttcaagattaaatgtctgagacagaattcaggtcatagaggtgcttagtaaataaagcaggccctaaccttattatagatatttttctaccaacatctctccaacctcacacaccctgccacatccattagttagaaaaatgcatattacttgttagaactcacatgttaagaatttagtgttctggcttagtattttaccagatactatgtattcttccttaaactgttgatttcttgcttaggtattactgtcccaaaatcacatttacttgtaggtacagaatttttaaatacctttggagttttaccaaactttatgaaattaattaaaactaaattcctaagacccaagtgtttgtgagccatctctttagcaacctgtaaatttattacattcatcctggtggcctgtgagaagctcggctgtacagtgtgtgaatggtggcagtgccgttatgtgctacatagcagttgggtttcagttacggaggtagttggcaactatgtgcacatgcctcctgccttgttctcagtggcagatagttaatctgcaaaccattagacacaacagtattctgatctcgttgaaggatattgtaggcttggggagatggctcagtgggtaacagtactcacagcacaagcatgaggaccagagtcagcatccttgaaacccacaataaaacaaacaaaaaagcatgactgaacatgcctacagcctcagtgtgggaaccgacaggacaggccaatgccaggagctcgctagcctgtagcctaacccaagcagtgagcttcaggaacattgaggtgccccggctttaagaaggaaaggcagaggatagtagaaagagcaggatgccccgtgtcctctttgggcctcagtgggcacacataggaacatgcacctatacacatcagcaagtgtacacacactgtcatagacatgcacacgtgtgcgtgtgcgcacacacacgcacacgcacacgcacacgcacacgcaccgtatttactctgagccttcaattcttttgtttccattctcctttcgccgtgaagtatttccatatttccatgaggatagaatattccctgtggcttttcaggtagtttcccagatttgtcactcagatttataatgtccagtgtaaatatctcaccggcgtggtaagccatgcacaagaatacagatctggtgggcttcagagcctcagggtctccagcaaagcatgttcccgactcagctggtaagcccttccttctgcacactgtgtttgagggacagcttgcttttcccttcacattttatccatttgcactcctcacatggacaaagccatcagatctataagaagatatgatattttgatgttgagaacattgaaaactgacatggactcttgattctcccactcaaaggtggctgagaagttaatgattttgttttgtacttcattactctaaactcatcatagaccagatcaccaaggtcatcgaaattctgtatgttttaattctaaaatatattctatattaaaaataattcaagactagaaatggggggcatatctgtaactctagtgctgaggaagtagaagcatgaaaaaggtcagtgctaggccagcctgagctatgtatagacccccaactccaaaataagcaaagccacagtatattggggaaagttttatattttaaaaagataaaaaaacaaaatgtatttatgtgaaattaatttttcttagcttctttaaaaaaaacaaattgggttgccttgtcaagtaaccattagaaagacactggacatcagtgaggcatgaaatttgaacttcacttccaaaataattatcccatccaaggaccaaagtagacacaggcattcacataatccctacttatatctgccaccagggtttcaagagatgaattttccccaaagggcctctctgttgccttcagccatatatatatatgtctttttttctcccaaactgtaacactcttggaaactgtctaatgacaatgatctctgctggaagctctgttaccatctttcttctgacctgataaatgtaggctgctgagctctgtgcacgctatcttcagttacttcaggtattttcctcactggagcagatgaaccaaagactgactgaggaaaagcaatcagatttggtagccgaggcaaaatgaaaactagttcccatatgtcttttttactcagaaccagggcatgcatgcacttgttttgtacacaatgggattcttagtaattgattcaataaacactaataatgatttatccataacaagtctgtaacaggaaatgataaaaaacaatcagaaccagaaagacgagctgtgttatgttaatgccataacattgtacgttcatcttaaagactaataaaaatttaaaaaaagaaatcctaaataaatggtagctaccaagtgcctgcaatttgccagattccaggctcattttacatgctgagaatagcaactttaaaaaacctaaatttcttcttcccttggtgggcttcatattcagagtgaagagataaaagcaaaatagaaatatgagcaaaatagttacattcctttctttcttttgtgtgtctttctgtcatttatttatttagtatgtgagtctttcattctgtctttgtgtgtgtgtgtgtgtgtgtgtgtgtgtgtgtgtgtggatgagtacacacacatgccacagaacacatgtagagaccaggggacagcttgcaggaatctgttctctgcttctaccatgtggatcccaggtcttgaactcaggtcatcagactgcatcgatggcaagttcctttatccactgagtggtctcactggctcctttgagcgagttctaactctgtgttgttctcatttgtgaaatgggtagagaaatacagctgcatagatagtgatggcagtactccatgaagctgtgtgtggtgccagccccaggatggggacaaagataaatttacaggtggttaaagagtgcctctcatgtggcaggctcgaagtaaatgttgttatgactacagaatgatgctgaagacagcaaatgaaggacctgagttttgtgtacatgagaacttaccaaagcacctccctgatgttaaatgtgcacttgattctgagctttactccgaaccttgagatcgattcttcatgaaggaagaatattcatggagattttaaaagaaacaagatggtgttcttttattatttccatgaccatgagtgttaatacacacacacacacacacacacacacacacacacacacagtctgccttcctatcagatcctggatgtgtcccggaggagctcataacccacttgtaaatgagactcacttgaaggtggcgttggcacttttattttattcttttttcatgtatgtgtggttgtgcataccagtgaaccacagcatgcatgtcagaggacagccttgggtgttgcttactatgtttcagtctcctgatgttcaccactgcttatacatgactagctctctcacaagatccagggaattgtgtctctgcttgacctaagtgtgctaggattacaggttcaggctaccgtgcccatattttcgtgagtcctgggagccaaactcaggttgtcacacctgcatgttaagtgctttgtccttggagcagtcctcctagcacctcttgttaatgaccacattagcaagatcagaatggtgttatgtataagtctttactccatccacctgagccctgccaccacatgggcgcccagaataacacacagagtcttatattagtttacaatgctgctggccaaatgactaggatttcttacatgctagcttagtcttaattatcataaatctctatattttataagacttattgagaatgccttccgatggcatcctcttcccaggatcacatggcagctctgtagaaaagagagccagagaaagaggaagcaccctgcttatattctgagtctgcctgttatgtcacttcctgcctggatcacaagacttcttactacatttcccagaatcctccttgattcctagtcccacatatcctgcttcctcattggcggaaaagtgctttattcaacaaccaataagataaacatacacagaaggacattccccatcagtgttagctctcagagctgtagtcattagaaagaaggctcatgattagactagttttgagaataagcagttattcatatgtaaaggtaaaatcatgaaagagatgggctaataggaggaaagtggaccgcaggtacttacaattttgataagaaacacatggtgcaaacttcattagccatgagatgcccagtggaaacattcattgagaagttgaagatatacagccttaggaatataaggggctcatatccaggggaaataatttaaaagttacacgtgtgggcatggtgactcacacttgttatctagcacttgactggctgagacagtaggattgtcaagagtttgaggccagcctgggttatgtagtgaattccaggctatccaggactggaggattagattctgtgtcaaaatactagaaaattaaggattagagtcatatatgtgccttttaggacattttgagcaaacagtcacagaaatggttttcctttgatcagcagtcaaaaaagaaaatcactttgaggccagcctggtctacagagcagtttcaggacagccagtgctacacagaggagccctgtctcaaaaaacaaatcatgctaagaatgtgagtggtgtgatatagactcagatgcagagatgtgacaagaggatgctcaaggggaagtcagtggaggatctgcatgtgtccagcctttggacattgtggcatgatgttgtctgtgttgttatccatggttgtgttgctctgtgttgatagttactctgagagacatgtagcccacagaccacaggttaaacatgcctgtgagggggaaagcgggtaattccagggaatgtttgagaatggaaggcaattatggattccatggaagacacaaagacacaaagaggcagcatttttagaaaatacccataaatgttaatgacaaaggaaatcaccattagaagatagctatttcctaccatatttttcctttgtgttgcaatcataaattaatttttcaggtagaaacgaatgaacaagtgtagacaaaggaagaacttggggatgtaaaagaatcaggaataaatcttgctgcactggactccagcaagaatggctgggctgcaaacttctaaaaccagcaggatgctggaagcaggaggtggttcacaggttcatgctcctccagttctgtatgcagcatggtagcctggaccacagttctcacactcttagacatccccataaggaggctcagactctgccatcttcagttcaagggcaaaaggaatcattcactggtgtttattctccctttaaaaaaaaagttatggcacgcagtgagcacacttagacactatgatctaaggcatctcttggtgactacttctatcacccatggaccacacagagaacagcagcatgctcatactcaaggggaagtgctgcagaatgaactgcttttcttttctccttttttaaattaaatttttatttaaattaaaaacaatcttattttacacaccaatcccagtctcctctcctcccatcctcccattcccctcactgacccccatcccacccaccccatccactcctcagtgagggtggggcctctcatgggggatcatcaatgtctgtcacatcatgtggggcaggacctaggccctcccccatgcgtgtatctaggctgagaatgtaaccctccataggaaatgggatcccaaagttcattcgtgcactaaggataaatactggttccccagctgtcagactggggtccatgagctcccacttgttcaggtcagctgtttctgtgggtttccccagcctggtcttgaaatttttgctcatcattcatcccttcatacacctggattacaggagtttggctcagtgcttagctgtggtgtctgcttctatttccatcagctactggatgaaggctctaggatggcataaaaattagtcatcaatctcattataggggaagggcatttaaggtagggtctccactattgcttagattcttagttggggtcatccttgtaggtccttatacatcttaatgtctagttaataaaataacctgaggttcaataaggaggactgtggtcacatttgaaaggctaatatagaggttagcaagtctgcagtggacagaaagaaaggaaagagagggggagaaggaactgaaggaggaaaaaagaaaggactagtaaagaaagaatggaagagaggaagatggtaatgcatactgcaacagtcaccatgtttttggtttatggcagccttagctttgaattttatgtgatctaaagttaaagtttgtcggttgtacaatcctttgtttgccattgttgatggattggttcctgctttcctgagtttttaatggaaacaattatatcatataagaaactacctcacttgtttctattccctggcatcatatatggaaaaatacagcctcatggaattgtctgctacagtgtggcctttaaaggagaatgcaagggaagacagctctccagtgggtgttttaaaggtggagtaaagtggagaggagggcagagggggcatgtctaagttcatatccagtctttgacaattacttactaatgtttgtgagtaaagacagttacccctggaatgaatatatttttaagtcatttggttttgtattactaaattcaccaagatcctaggcaaatgatatctaacattgtctaaatcactcaagtagaattctgaatcaagaaatctcactggttcctgtgctttgaaagaatacacagggaaaagcctgtcacctaagaaaacagtcactcatagagaagcagggcttagaaggtagagatctagaagatggtgaccactgtggttctgaacacctgaccatcaggactggtaacatgctttgattgggctggtggacaaaaatcagtgaatggatgtatttgaaatgaattttcagattgacgttagttaatttaatttctagcaatccaaattgcttgaggtaaggggattttggccagaagccgcttgcaccatgaaatcccctatggtggtcactccccaacacagataggcacagctttttgaagttctggtttgctttgtgtggtagtttgctgtttcggtagctccagaggtcttaatctcaagacacaacatctgtgataatgttacatttttattgctttgaccaaatacctgatgagaagcaacttaagggagaagatgttcactctagctcacagctcagaagaggagatcatctgtcgaggcaggaagagcattgaggcaggcaggcagcatgaaacagctgttcgctcatgtctgaacagattggccacacagagggggcaagaagcttccaatgaccagctctcttcaggaattatgcttgtgtagctgcacatgtaggagctacagctactaccgcgtactttgggttattgaatattttaaatattgtacgtgttgactgtgtggactgaatccaattttcactttaatattgtttcctaatgtgtctgccacatttagagttgcctctgaaaacttgctcctagcttcttcgtgagagagtgaaactgaagtgcagcagcttcttgcagcatgacaaaggtattgtagctgttagggagtggatgcaaaatgaaacatctgtacctatgggtgcccacagccaagaataggacataattatgagtggcaacagattatagtacagctttgatgatctgtaatcatctaaggtctagtgacaaattcacaccacttgccgtgtgacccaagatgatgtctcagttcatgtggaaaataaaagcatatgctgagcattgcaaggtggtctgggtgaggagataccttggtttggaggcagtgaggcctctgacatggatgggagggagtccacaaatctcaggacctccatcttttcacaaatatatatagtattctgtaagatcctttcaactacaaattctgacttcatagaaggagtcctgatacctagacaggagatggaaagtggaagatacaaaacagatcaaacttccagaatcataaaacctggagagagaggagagaaaaaagatatagcagggaaggaaacagggggtagaaaaagggaaggaagaaaaggagggagggagagagggagggagggagggagggaaacagggaacaaattgctacgagctgaagtagaagacatggccaacaactcattacttcttacaaagtcttgcttaaaacccaactttagacaatggacctttccatgagtgacacagggccagccacagtagcacatatactgacgttactgttttcatttttctccacctcccaactacaccaggtctacactcctaaagtagtctggaaagccatggcctgtgtgtgacctggacaaaacaaaacagcatttcacacctggaatgaaagactgattgtgtatgtgtctgctgagggctaaaggggtcacagttctctgtggatctgtttataaatacattttctacacaccagattcattttggcctggactgacactgtggtaaaataacaagaatataaaagagaaatgaactcttgcagctgctgtagaatctattagtttcctgggttctttatgtttttttttttgtttgtttgttttttcttggatgcagaaaaaaatctatttcatgtgcctggttcacatgaggacctgtcacactgtgggttctaacacacctcagctgtatggaaggctggagagagctgcttctctcccacccccctcttttttcctttttcaagttatggtttttctgtgtaatcttggctgtcctggaattccctctgtagaccaatctggcctcaaactcacagagatctgcctgcctctgcctctgcccctctctgcccctctctgcccctctctgcccctctctgcccctctctgcccctctctgcccctctctgcccctctctgcccctctctgcccctctctgcccctctctgcccctctctgcccctctctgcccctctctgcccctctctgcccctctctgcccctctctgcccctctctgcccctctctgcccctctctgcccctctctgcccctctgcctctgcctctgccgggatcaaaagcatacatcatcatttcgtggtaaggctgctattcaaatgggccagggctaagataggggtaagccctggggatgtcacatctatatgaataggaacaggtcattggtggtaaaggatcaatgctactgacactctgtccttggctatgccctgagaaacttagtgtcatctctgtggaaacattcattgagaagttgaagatatacagccttaggaatataaggggctcatatccaggggacctgaagtctttctgttgaccttctgtgtactgaatgtaggaggggtagttcattacagaggcagagagtgaacttatgtactgtatatggcaaaaggacacccaatagctgaagagcccccacccccaaggcctccctgtataaggaaaatgttgcctgcagcagctttcagagaatttcctcattctctgctgatatacgggtgacctccttccctcaagtctaagttttcagtcttttctaaacttacatgctcaactgctgaatggccatatctcctggggacacccagtttctggtcacaatggaccattttctccaaatatgttccttctcctatgctccatatgctgacagtgacgggtcactccttcccactcattttttgttgttgttgttaaaaccaaacgcttcctattttgcctttttctgaaaggtctcagtcctgtcatttctttcatctccattactgcccgactccctctagagctcacattttcttactttcagtgctacaaaaatatcccatcaaggatcccatcctgggctcatccttgccagtgtgtggctgccaagtggtctttctaatgtgatttcattgtgacgtttaaggtccttaggaaagcaagccaacacaccctcaatggctctgtgctattccttcggctagaaagccattggactccagcaagaatggctgggctgcaaacttctaaaaccagcaggatgctggaagcaggaggtggttcacaggtaacatccattttcacagtctaaatttctctgcccctttgtggtagccactgactatatggtaagactgtaagtcttaacatcttcaatcgcaacatgtcactgattagctctgatgacaattgattgctgagctgtccactttgctcctctgcaagttcctcaggggaaatgcccagctctgatggactcacacagtggacaaccacagaaaaaacacttgtaaatgtcttccttttgccagaacacaaagcacatatgaggattaattgactgcatacaggaagttgtcgtgcaagttagccaaaaagttagttctaaaatggtctgctcccccagatttccttcagcatgacaaaaagggaaaagcacaactgatatctggaaccaattttatctctgatctggaaacagtaggattagattgtcaagcacctgagctattcactagagtcaagagctctgaccaaggggctcaggtgggggttgtgaggcagccaggacactactggatctttaagtcaggtgccgaggaggagtttgaannnnnnnnnnnnnnnnnnnnnnnnnnnnnnnnnnnnnnnnnnnnnnnnnncccaatgaggcctctgggttgagaaaaactgtcctgagagtaggaattaaagacacaaagaaacaagaagagctcccaaacagaaagacagagacagtggcagagcaggtagagcattcattttgtttacctccttgacgttttcagtctacctaattagtacctcatttggctctgctcaagatatctttcatttgttaaaattattttatagacacagaagttatgaatttgttacagtgtagtaggtaaaagtgatgcattctctatgtacacatgtgcaactgcacacatgtctgcacccacccacataagcatgtacatgacccacccccatatacacacaatgatgcatccttcatggccacttgtgcacgctcaccagcagttatcaacctgtggatcacgaccactttagcaaacttttatctccaaaaatatttgcattactattaataacagtaacaaaatcacaattattgaagtcgtaatggaaataattttatggtttggggtcaccacacatgcgggtcacaggattagaaagattgagaaatcctgatgtacacacatacctcccccacagtgtgtcctctgttcacacacatgcatacatgcctgaacacacactccaaacacaacacaagcacatacatgcacacgtgtgctcgggcacacacacacacacacacacacacacacacacacacacagagtctctcctcaatactcactgggagaatctgttttttgggttttttgttttgtttttcagcattgtgacacttaagtgatacttccaatgtcatgacaaatctcagataactgagcctccagtctgtctctcctaatagaactttttatacagcatggacactgctttgtatgcaaggctgcactctgctttattataccttcaacgtatgtatgaaacatcatgtacctcgaatgaatagattttgcaacatttatctttgtgcatttaatacttttttaatgtaagaaagcatagcatttgtttacatgggatgaaagggagaagtaattatggaaatgcagaatcagacatctggtttttctcgtattttgtgaccatttctctagtcacaccagcttggtaggagttttaaagaaatgcatgtttaagtgtatggacccatttaactccaacacccccagaatttgcttcttataccctgtgtcaaatagaaaattttgtttgactagacgtgatggccccagtccagtcgagcacagccctaaggcatcattctcgactttggagccagcttggctctattcaagaaaagacagggacaatttttttttttcctttgaagtgtctcccagtgactctttgctgttttataatttagggctaagctttaaaagcactggactggctatacacaagaaactatttgtgtaactttctctctatagacagagatcatctcttcattaactactttctctagaaaaggagaatgggaccaggtagcccatggcatctactttgtggaaatgtgccttccccttgaagatctgcagaatctgcacctatttccaaagaaaaggtttctcctgtcccctcaggcaccagtgattgtttggaagctgatgttcctgcttacctctgactggaaccaacaaatccctaaaactgttcaccatacttagacatttcccatcattgttgactctgtatctgaaggaatacagatttctgggtgttggaggtggcctcctctacgagttaagaattaatgatgcttctcatgttattgtgactctgatcctattagaagttgagcagacagaatggtggaaatgaaaagaaagcatttctattgattgatagcctgaggaaacacttttgtagaaggactattaatgaagcagatatgtgtcaattgggggaagtcaaccagtagtggattctccacactgctccaacccccagtttagaagatctggaactgagatagcgcttatacaacattgttttttattgtctcatagcctgagctcaccaagaaggaagtaagactctccctagtgttgagataaaagggaatctgcaaaaggaagtgatgtctaagtactagttcatcattacagttttagtaatcattgttaggggatctggctgtgaaagttagtctctggtacatttttgtaatagcaggtggcaaggtgcaacctaaatacttacccacaggggactgagtacatgtcatgatacatctgtgcaatggaatagtatgcaactcttaagtgacacaagggccaagaagttggctcagtggaaaaagtgtgtatcacacaaacatgagaacttaagtgctggtgtccacaacctatgtgaagccagatatggaggtgtacatcaggcagatgcaggcttaggagaatctctggaagcacaaataccggccagcctgctccatagagcatgatcaagagactctgtctcaaacacacacatgcacacatgcacaaacacaaacacatgcatgtgcatgcacacatccacacacatgtgcacacatacatagcacacgtttatgtgcccacacgcatgtgcatatatagagaataagctcacaaagtgggtttaagctcacagagcatctgcctttatttatgtttaggtaaacacatcttctctcttactctaaagaaagctaccaaaatatcagtagcagtttatagactcattctcttggtagacctttaatcatgttagaatatttacaaagaaaatgtatatttccctcaagtcaaatgtatacttaagaagcaaaaccgagctagtatcgtgagctgccatgtttcttagtttctgtttgaaattccgctgtactttctgaacagttccacattcataggcttattagaaatacttttaatgtcttagtaacctattttttcaaatttcacaataaaataactttatgatccataaaaattaagtagtatatagaggaaatgaactagaagtaataacaaattaaaatgcaacaagaggaaaatgatagtactgatacaaggatatagaaaagggaaaggtgtcaggcggtgctggcgcacacctttaatcccagcacccagaaggcagagacaggtggatctctgtgagtctgaggccagcctggtctacagagcaggctccaggacagacagggctacatagagaaatcctgtctcaaaacaacaacaaaaagattaaattacttttaaaaaggaactaagaataaataaaaataccaagaaattctgaatcaaagaaaagaaaatatgaaaacagaatgatactatcctgcaatgaaaccacattatattttataaaaacctaaacccaaggattcaaccctaacaacagttcaaaaaattcaaaagaagaaaataatacacaaggtttcatgcagctcaggatggcctgtcactcactatggagctgatgacaacattagattctcctgattctgctgtccaagcttccagtgtgctggggttataagcatgtggtacccacccctgcttagacaaaatgttttaaccttcatggtgtgtttggaaacagagaagcaggtatcttcctcttgtcacacatttgctatggactctgtgttcttgctgcataactactatcctataagttagcttatgtcaagttctcaagaattctctggagcatcacccaggttctgcaagaaaaagggtatctcacaacaaagtcgtttgccttgttacgtagtttgtacaaggcataatctggcttccagtgtagctttctcactcccaagttcacctcgttgttttatggttagtgctgtggaaaacactttaagagaaagtgaaaaaatcaaaataaaataaacagagtgaaaggaataaaagcatcaaaagtagtgcttcctaaaattagcagccatttctttgaaaatgtgaaaataaatagctttcatttacgtgaaattgctatttagggctagggataaagttcactaaattcagtctctcttaatttaatttaaatacttactatttcttcaagaagtaaatatactcttcttctgaaacatttgccagtgggaatgggtggggagattcaaggccataaaagagagacgcttgtgttgacttccagactcaggtccaatggttttgttgctgtgctaagtaataccacactttctcagtgtatgggatgccacctcccattgtgactgtccttttgtctccacggtaacagctcttcctgtgaccagctttacacagaaagtttcttcactgagatagtcaagaaaagaaaaataccacataaacccgaactctgtatcccacagtaagggatggaagaagtgtttgttgaatgaaagagcaaaatagaaatggcctcactgcaatggaacgttgggcagatgtgccctagcatttgcacgtgcatctccaggggttagagcaaatgttcacaaaatggaaaggcagaggattgtcctggcctccctttagaccctgactacagcgcacggagagccatctaaactgaagatttaaaacagcttcactgtgcccctctgagtgcaagggtcagagtcatgttaagtaaatgagtctgttttggagaaaacctgcaaagctgcattccaggctcccaaaggcagcgggcccgggggtgtgtgtgtgtgtgtgtgtgtgtgtgtgtgtgtgtgtgtgttagatcgttttaaggccaagtgctggtgtttgctgatttacagagctttcttgtgttttcagcttttgcaaactttcatagccatgtccatggtctctgactctgggggctgctgcaggcattttacttagtagatgtttaaataccggctactgttgtttggttttttatctgatcacaatctgacacactttcttaaaatgtttaaggttctggccattgaccaaataaaatttgaaagcagtgtgaaaattctgatcatgataaggtggatgatcttgcaaaatagcagagtattgtgtctagatgtgccagccaatgggttttatagcacacatcaatcaaatgagacacctttggaggtatctatcctctcaacaaatgtttattgagcagccactgagtaccagacatgtaaagtgggtacttttttattgttttgtttttttgcttgttttttttttttttttttttttttttttttttttttttgagattggttctctctgcataatctagactggctttgactcccagccttcccacccccacccctgctctgctccagaggtctgagattacaagcatatgacccaattctcagtttagacatgtgcctatcaaacaaaaatctctattcttgtggaacttagagtctcgtgagaaaaaaaaataaaactaatatcacatgatgtcagttgggcaggggtcagtaagaaagaggaggaccttaagagccccctgagaagggacatttgctccaggacctgagggaggtaagggagggttactggctagcacaaaaaaagagggatgagaacccaggcaagctgagcagagtgtggaattctcaggaaaattcctggaatgttctagaaacaaggtgaatcctatcgttagaagagtaccccactatgagtagagaaatagagggacaggggactggggactggcagcagatctcatagaaccctgaagacagaggtctgccttggctctttaatttgagtgaggtgctggagggatttaagccggaaagtagcatctgctgatggaagggttagatggactttttagatggtcgttgtgagaagagactggagggagaagagtcggaactttaaaggagactgtgaaggcagctgcagtgtattataaataaaaaatggcaccctgaaatagcctgatgggtagaaacggtgtgatttgctggattctgggtaactgttagaagcagcagcagttttaatggctaggatgtgaacctgttaaacaggaatcaatagactccacatcttcaagagcacctagaaagattgggttgcctttggcttagtggaggaggagctagcaggaagaacaggggctcaggcttggccgtggtaggcgtggggcatctagagaagctgttggtattcatgtgtctggacattcgggggagatggctgggctccacagaaatctgtcagtcaacaatgtctagtcataggtgtcactaaaagccaggctactcaatgcaaagtctctgagatgtggagctctcaatatttacaggttcaacaaacaaacaaacaacagcaacaaaacagagaggagccagctcaaaagagacttataaggcatggcaaacaaagaggaggacctggaaggaggagtcatacaaaaagtcaagatgtctgggtgggttgttcatgggaatgccagcagtagctgaaggagaaaactggggtcccttcaataaccactgtacccagtgctctccccagagcaggccatctcacagccttcaggttggacagggagctgaagcagatgtctagttagagtcaccagacttacaggaagggcagtgacccacactgtaaagacctaaaaggaaggctggcccagctcacctgctgtgaaatccccagtacaaaggcacccaacagtgtttttataattctccttttctttttaagtaattttgaatttctgagtagtttatgcatctttaattctctctagaagctggggtggggaagtagcagagacagacttgggagatggctctatggatcatgaacttgttacacaaacatgagaacctgagttcaaatctctagtgcccatgtaaatcccaggtggttgtggcagtccacctgtgattccagagcttggaggatggaagacgtagacaggagatccctgaagcaagctaggttcaccaggggaccctgcctcagtgacaaggtcaagtgactgaagatgtgtccggatgttaatctcagacctccatgtgcatactcagtcacaaagactttcttgtgcacacatgcatgaacaccacacacacatgcatgcacaccacacacacatgtatgcacactacatacacatgcatgcacaccacacacgcatgcatgcacaccacacacacgcatgcacaccacacacacatatatgcacaccacatacacatgtatgcaaaccacacacatgcatgcacaccacacacatgcatgcataccacacacacatgcatcataccacacacacatgcatcataccacatacacatgcatgcacaccacacacacacacacacacacacacacacacacacnnnnnnnnnnnnnnnnnnnnnnnnnnnnnnnnnnnnnnnnnnnnnnnnnnnnnnnnnnntgcatgcacaccacacacacaacacacatccatgcacaccacatacacatgcaaaagaagcaaaacaaagaaaacagaaccgtcactgccatggtacatgaaacagattgtgacaccagagctgtttgttctgagctttctgagttgcttctcagtctctggcagttcattcaaaccaaatgcatgtgtattcaaacccagcttgttttgcatacatattcctcacccctgttgcttctgagttttaaatgtttgcttcttggaacctcacaggtagaaaacatgtacacctccctttacagatatgtactcatggtgctcttgtaggagggaaaatggaaattcaaacaccacctgcaccccatcataatacataccagcatcttggagcatagagacggctccctgctggttcagagtgtacagcctgtcattgagaagaaagtcactaccttgctcctagcgtcgccatggaatcccatttcaaattgattcaacagatgtctcttcttgtaggaaaaactgtcaagttgttgtagacagcctaagaaaacaacatgtggggtgggctgaggaggtcactcagtcgccgaggagtgaaaagaaccctcccccccctgcactcccagtgcatcttctccagagactgggcttacttccccatgtttgagagacaatccctcgacaattagaatcagcttcctgtcccagcctaaagtgagaccaactcaagccaggcatggggtgatggtaccacagggaagacccaacaggtagcactgtcctccgggtccccgccatgtgggattcctatctctgagaagtaccagccagttagcagtggcctagaatgtgaagtgagagccagcctcatgtgcagcaaaagagaatttcatttcagttgttcaattaagtttcattttttggttgcctggggaaaactaaagaaaggttttcttacttttgtccctcgctctggttcccaccccactagcgaaaaactgagcaattccacattgttgaaatggctaggttgtgtttgtattggctgaattaagcctctataattatatatttcctctcttttgtctgttagtgcttcaatattaatgtgggacagaaatttcatttaatgaggacatgattttcccattgtcttagggttgtttaaaccacagctcatctccattcaagattccccatgttgtagccctcaactctgaactgacactgaattctgttctcaccaagccgtgcattttttacaaaggtccccatggctggtgcatttgctaatagatggttcttttcttgccaggttttacgtacaagtgagattatacacgggaaatatacctgccacaaggggcacagccttttatccagacctccatggccgtcagacacctatatgttactatagcaaactgtattcagaatatgccggggtttgaaacttctagaatgttttgagacacagtagttagttcttatcactctactgtttcttcgggacagccatcctgcagatgggcagcttagcactggcaggaatctacaagttgtacaggctctagtcctcatgcagctttgtatatttctgtgagcacggccctctctatgcctgcttatgctccacgtagtctcaccctcagtttatttaatctttggctgaaagtttatgccccttgcaggagtccttcatgggaagaggcatggctgtttgtccatcccattttctgcctgacctgaatctcctcagtgaagcaagggacaggcatcactgtgcagtaagcatgtgattctggcattgactaacttggcctgttctgttgtttgtggatttctgaaactgtctctatctagtgtgtaatgaaaatcacttgacactagttttgtctgctaaagagtagatagagggccgggcagtggtggcacatgccttcaatcccagcactcgagaggcagaggcaggtggatctctgtgagttcgagacaagcctggtttgcaagagctagttccaggacaacctccaaagtcacagagaaaccctgtcttgaaaaaccaaaaaaaaaaaaaaaaagagagagagagagagagagtagatagggaggttggggtgttgcctgcctcccaaggaagacctaaattcgatcctcagaacctgagtaagaatgtgctgggatagatggattggggtaggtgcttgtaatcccagcactgggtgggggagagcatggagatactgggctcactgcccctccagcttagcctagtcagtaagctccaggctgagagaccctgtctcctgataaacttgatgataacctgagtgacaacatcagaggttgtcctctggcctacacatgtaatatacacacatacatgtattctgcatgaatacacacacagggagagaaagagaaagacagacagacagacagacagacagacagacacacacacacacacacacacacacacacacacacacacacacacaaacacacacacaaacacacacagagagagagaaagagacaaagaaaccgaaagagaaaacagtttatgtagccatttgaacttcttagggttaatgtaacagcctcagtaataagttctggccctttgctaactgaaaaatggggagggggtgtctcttcaaattcctctcctgaaagaacatagtaatttcaagctgaagatgggcatgtttagtgtatggggttttgcaagaccaaattgctacttcttatagcaggaatttaatatactgtgtgatgtctactgtggagaatgttgaaaaaggtgatttgtgacaatgtcacacttttcatttcaggggccacgaaggaagtggttcctgccacaatccctgcaatattttactggctagtgtaatttgcaattcttaatttgtttataagctctgagtagaaactaccacagtagaatggctgaggagagagtccaggatggctaacataaatgaagagaaatgcaaacgacttgcactgtgtgcagaggaggctcaggaatagaacacatttttgcgtgggtgacacacaagaacaggacatgttaacaaggaggaattgagttcagccataaagtatacttgtgcacactgatggatattatattggaatggattatttttgcccatccaccccctgcacatcccgaccagtggtaggtattgggttggagatctttctgtttctggcagcatgaaagagtcagggttcccagctgctgagtggctgagtcagggtttgggtcttgtaaaagatgatctgagagatcccacacttgctaactaattctacagcagcgtgtagcagcttgctttgtgagggaactctacaagcaaactctgtcatggactagatgccacaaggcagggaagttggaagtgtacatgggtagctgtgagcaaatggaacaccagagcctggcaggggacacactcaggtcaggtgatcaggtctcttccctgaattaattataatgaacacttatgatagagagatttctacaaattttctcagattttcttcacaaaagcccacaaaagaagttttccaaaacacaccgttacagatcttctaagagggcacaaataggcatgaagagattgggccaaacacaaggccacaccttttcttttaaaagaaaggaagagggggggttagaaacatgcattcaaattccttggctccaatagggtgttgttacaatgagcactcacaggcatcctgtggccacatgaatgtttccatgcccatagagccagagttcagctcaaagggcatttaccctgtgcttagagagcatggaaaaatgaccaattacaccccaacttgcttttcttacagaacatgtcaactttccctctcaggaaacaaatgtcatcagtctggggttagtgcattctggggtcctaaccctttacaacagatacctgaatgccttttaaggtgcttgctgtgtgtgactcacttgtagtttgatgttctgtaagctacatgaacagattttgattgagaaacattttagaaacgctgaacatatcagagtgatgacataacagtgactaacattgctggtaaattgctggcattgtaatggcgttaacctttttttgattcagtgtgtttaccccagtttgttttatcttgccttgtaaatggctgtgttggcattgaaacattaataagcactgttggtcttcctcacagatctcactcctactcgtaccagccataggcaatgtattccagacataccagaattaaacgtaggattttggagaacatttttattgacttggaataaaagaaaagcagcataaatcacaactattaaggagatgatagtgcgcctacacacagggaaagtaagtagctcagatacaattagaggcattgtgatgccacattctacaaagagcaaacttttcttaaattcccaaggaagcagtttaatacaagagacaagagtagtgattgctatcaagtctcaccaagagaattaacagagacatatatgcacagttatcagaaatttttagtttattcagagcaaacaggcctaaaagcagttagaaagtgtagaaaggtgagatcatagtgaaccatgaaaacatgacactggcactagtgtgtctgaaacttgttgcttctcaggcaaacaagaaaaagcctgctgaaatggctccatggtaaagagcacacactgttcttcgagatgatccaagttcagttcccagcacacatgctgggcagctaacaactgtttgtaactccagctccagggcttcttcagacatggggcagccacacataacacatacataaatataaaaccagaaagaaagaaagaaaacaaagatggcattcagaaaaacacaaagaactggaaagagcacggtctataaaggatatgctttgcaaacacaagtacccatgttcagtctctagaatggacttttaaaagccaggcacagtgggtcatctttacagtctcagggctgagaaaaaagaagcaagaggactcttggggattgctggccagccatcctactcaactgggctaacatcaagcctgttcgaccctgtttcacaaaacaagatggggaacctgaggaaagatactcgggattgtcctctggcctcacacacatgtatacacatgcacttacacacctaagaacacacacacacacaaacatagatgaaaaaatggcttcacatcagagcagatgatgattaaaggaagaacaaaagagaagtaatccaaacctaaaggaagattttcaactgaactttgtgaattttgtttatgcaaaactaataaacctaactgaggcttacagtaatgtgagaacatggcacatgacataaaccagagaattaagtgtttttgcttctcacctctgtgtaattttaacctctccaagtctgttttatggacacagaaatcaggattcactagactttgtataaaaggagtggagtttatttggggaaaagaactttcacagaaaacaagtgactgtggaggctctccagctccaaggatgcagaccctgccaccctgatgctctctgcaacccaaaaggggtttcctgaccgagccttttccttttaaccagaccagaaccttttccttttaaccggtcatatctgcacctgtgaccacaccaaaaggtgtgatcaatgctacaggtgtggaggcagatgtatcactacaccattccatgcnnnnnnnnnnnnnnnnnnnnnnnnnnnnnnnnnnnnnnnnnnnnnnnnnnnnnnnnnnnnnnnnnnnnnnnnnnnnnnnnnnnnnnnnnnnnnnnnnnnnnnnnnnnnnnnnnnnnnnnnnnnnnnnnnnnnnnnnnnnnnnnnnnnnnnnnnnnnnnnnnnnnnnnnnnnnnnnnnnnnnnnnnnnnnnnnnnnnnnnnnnnnnnnnnnnnnnnnnnnnnnnnnnnnnnnnnnnnnnnnnnnnnnnnnnnnnnnnnnnnnnnnnnnnnnnnnnnnnnnnnnnnnnnnnnnnnnnnnnnnnnnnnnnnnnnnnnnatttccactttagttgtggctctcaaactttaggatgcttttggaaaatgcatgtttccatatcccatacctaggcgttgaatgtcaaatgggaagatgcaagaacttgagattagtaatgggccagttgggaagtggtctgttaagttaaagactaccattggctgtatgagctctgactgtatcaaatataaattttaacatgtagaactttgctcatagtgtcttacgagaaatttgacataacatattttggtgggagaaaaaaatatgctgtagcccaagatgttcaagaactcattttgtagcccagggtggcctcaaattcctttaaccctatgcctcggcctcctaagtgttgagattataggtgtgagccatcacaatgttgacaaccaaagtttcaaaatataaaattaaaagaattacttaacacaacttttgtagaggaacaacatggagcatggggcctgagggagggggcagttagaagattgttgaatgccattccaccagctaagaccaagaaggtattttgctttttcctttcctgagttagatcactaccaaagtttcagagccctgtattttcaaacagattcaaataaggagagggtccctttagctgaaccctttgtttcatgaaagaaatcaggtttgaagcttataaaaacaaaattttaaccatcaataaacacagttatggcttatagcttatagaataagctttttctcaataaaccacttgaaccaatgagcacagtcatgatgctaagtgtgctgggtataaaattcaaaaaaattatgaagttccatgacactaaaatggcttagtttcctatcactatgcactcttctttccttcctttccctccctccctccctctttcttcttcccttccactcacctttccctcccttcctccttcccttccctttctctctttcttcttccccctctttcatacacatttatttattatctgggggaaggggtatcctcatgtcaccactcccatgctggagtcagatttcaaattgtggtggtcagtccttctatgatgcagattccagagatcaaactcaggttgccagacatgaaattaagcacacttacctgctcagcaatcttatatctgcccccctggatatcttttatattgaagcagaaaagcactgaagagattttcaggagaagggatgtcaatacttttacagagaggaggtaaggccctctgtgcagaaccttgacttgaccatgccttgacctgagagagtaaggtggtggttacccttgacacaagagagcagctctgtccttgagctgagcctaattttgtctgtgtggagagatcacaggaatcatggctgccctcttcttgcttggagcaacctctggactgtgacataaagtggatttgcaagcagttgtcttcagcatacccactggagacaagcaagatgtttcacaaagggaaactctaggcaaacaactgcagctaaagacagcactgcaagtaaacgcttccagatggagactggttgccactctatgctccgtagttctcactttgaagcattagtggggaagaagccttggaggaaagctcctcagaatccttggcctgcctttccaccctagcaaggctaacctagagttacaaggggaaaacacagccaaataaataacctcagtctattccctgtagtcaatcagcatatgcttttcagaaaaagggaaaaaacatctgaggaacacaatgctgagttggaggaacatcttgagtgggctgttcttctcttaagaaactataaaggctgtgggtagccgtttgaaagagcctggtggttaggggagctacataaaggaggaactttaaggcacaagttggaaacagcaggtggcaattaattgcagcatagagttgtctgccttctttcccaccttgcaaagctctgaggcttgctttgtttaatctttatgcctacaaaaatgccattttgcccattgtttttcttcatcccatcagcccctcacctcctataactccctgtactaaggactggggtactagcatctgcctgaagcagaaacacatatatttcagtcaaataaataaatgacaagaaacaaaagccagctacatcatattgttcttttccttgctggctggcatcaggcctggcatcattgcttatttctttagacattaggtagaaggccccatactcatggaagcatccctggctgggatccaatgtggcaactccgttcacttcacttctcaggcctctaggtttgaccactgtattctgtgacttgaatgtttgctcacacaagttagtcctgcaatggtggcacccaagacactggcgagtaagtgaagggaatccccctctttagagatgtgcatttcgaaccatagctcatgggatggctaatgaggacattgacctccgtgcttctctgtgctggcctcgcataacaacaggatgtgggttttaacacatgtaagttcttcaagtggcctctttcagtttcattctgctttgggcactagaaaatataaaccacggttttaaagtcatctgtttttcttgccattagtatgcttttattacagttttaagccccatcaggattagattctattcaggtatccgagtacatgcccacatatatttaatactaattatacataatacagtatgcaaataaaatgagatagttacaaagcaggcagaatatgatgtgtacaaaagaagtttcattttctgtaaatgtggaaaccaagggtgttcccctctgtcgctcgagccttcttgttactatgcttcctggtaaccaaagatctaagtgaccaggacctcaaaataatcatgaactacatatagatcctggtgagaataaaagataattacctctaaatgaattgtttaagaagttgtcacacttgagcgggctgtgaagtcaggagcaggtagagatgtgcctgtctcagaagctacagtataagtaagagcagaagggatctgactgtgttttcactgttactgtaactccgccttctcttcactgtctctttctcctctcctctcctggttccttctcgttctcttattgctcatcttgtgggtgacacctgctacccattcacttcttccttgccttctctgctcccatcaccccaatatatactatgaagggggaatcaaacagtcatccagcctgtgggcacaatactgtagaattttttaaatttcacatttgaggagctggagagtcagtggttaagagcacttggtactcttgcagaagactggagttccactctgagaatccacatgaggcaatcttaaaagtgcctacagcctcagctccagtagataggatgtcctcttctcatctccaaatacacccacaaacataaacacagacatatatgtccacagatatgagcacagacccatattaaatatttaagaataaataaaatattaagtgttgagtagtcctagcactgaacttgttaaagaagaggtttccgtttcagttgacactatccaaaacaaacaaacaaaaaaccccggaaggttctttcctagcttttcttcatagtgaagaattctttagatggtacactctgtgttatgctgcatgaacaaataccttgaaagacaagtcattccacatcacacatcaaaggttccattcaaccccaaatgcctggcagccctctctgcaccttcttcactggtttccaatggaaataatgtacagtgagttccagcttcaagcctgcacagggtgcagcatggagactctaagaagtcactggattcctactcaagaacgtgctgcctactggaagagaaagattcaaaaaataacaatttcagctggctgtagtggcacatgcctttaacccagcaggcagaggcaggtagatctcggttagttctggtctacatagcaagttccagccagtcagtgccacataaggagaccctgtctcagcaaagcaaacaaaagatttattccaaggcactaggagaaggttcctaattgcagagatctgtgctgttaagcagcaatagaagccagttatcacttctttaagggagtagatgagttcctggaaatttggcatgaaaactaagtttgtataaatcccaagagttttctacaacttcaccgtgcaattggaaatgttttcctacagaacagtctttcaaaatgctgaatgtaagacttgggatcagaaaacatgggtattgcatccatgttttgtcctctggagtttaaattttcctaggtaatcctgcttccgtttgccatttccaccttgccactcatggttttcttcttgcaatactttgctgaatctgggcttggcgctaccttgggaccacaaatatgcctttctttctatgtgggatatcctgtcttctcagcttgcctctgagttttacttcctcttcctgcatttctgttgagataattgtggcatgtagtacagtccaacaatacactgtctgcttggacagctccaggtgttgaagaggactaagttgctatctgttcgcttcatgtgttaatttagaatgaggaatgtctgcatgtctttatttatttaataaatatttattagccacccactatgcataatcagaatcacacttcatatccccgtgggcttaccaggtggcatagaaagacaagcactaagtacttgtttgtaaccatgataaaattacagaggacaaatacaggtttctaggaacacatgtacaatggaactgattttggatgataagtaaaggccaggaaaggtttcctggatgggtcatatctcagctgagctcttcagggtaagcaggatgtgccgtcagaaagaatgctgagcatnnnnnnnnnnnagcaggaaagataaagatgtaggcagccctgggcagcaggaaacatggaggtgtaggcagccctgggaagcagggccactgcaaagacaacagagaggaatgaaacgagaacactagattctgttcccaggttcaggcacttcatttctgacttggaggttttgtaaatgtgctttatttgtgtttgcgtctcctccaaatagcagaaggcctatcttacttagattaggatataagggggactgtatctacataaaacaaaacatctgaaagtactcgagagttggaacaggtcgtagagcaacccaggcccagcttctgtctgcaacctgcccactccccaccccccaccccatctgtgattctgtccttcccttatccagaaaaggcctgggcccagacacagacacccattcaggcaggaggaagggggaaatgtactgtactgggttcattttcagaaaagcttgagtcccaggaatccttggtgaatttcttcctggtgtcactgcccagaacacaggtcaaatgataaagaacttagggaaagtggcagcagtggagagggagctaggggacataaatggcatttgactccacttctgggcttcctcacctcaaacagggaactcagctttctggccggcatggggaaagctgcagctctgaggacctctatgtcagaaggggctgtgacattaattagctaagctcccacaggacactagcgagtgatcctcaagagccacagagaccatcccattctgtgtctctcctcggcgcagtgagaagacactgagcaggtagacagcatgatcatgtctgctttagacagaggcctcggtttatcctttaacacatatgtcccattttatactactgcagaattccagcatagcgctgtcttcgtctctctttgccctgggcttactctcctttgtatttttcctttggcgatctcagttgttttgagatgtgtaaaattaaaaccaaatgcaggtgtctgaggtcctttgattttgctttttttttcttttttaagaatctctttctttttttaacttggggcaatttaatgccagaacagcaatacaacaactgtcagaacttccaaaactatttggctgagaacacacgtatagattaggaaggaattagcccccacaatttgactgcttttgttgacctcctgccctgctactaagagccatgctgctcttcgtgtgcttaaaggagccagtgtgcattccttcactcccccctcaccccaggctcttccacttccttcctatggctttttttagaaacaagtgtgtttttctcacgtccggcaacaaaggatgttttgtgctgctaccgaagtttgtgtgtgtgtgtgtgtgtgtgtgtgtgtgtgtgtgtgtgtcttacttcagatcttctagagagtgctgcctgcatctgagtagagtgagcagagcttatctccagggagtctctgaccgttattcttgtctttgtgtggctttgccacaactgaacttcaaaatcactttcctgtgcgttttaaaataatctaaaaacaagcattgaaattaactcagaaatcccatgcaagtttttaatcctttaaaaaaagatgtctaagacattttctcaatatattgaattgatcctactatgtcttttctgtatgtttgctttttgagaaaggtcttatatagctcaggctggtctgacttccttgaacttctgatcctactgcctccttcactttcctgccaccaccatgctcatcttctatgtctttcaaagattgtcgtctataccctaaatatgctgggtaacgaatgctatgggcagagagagccaagatgaacaaacataatccgtggtgatgttcgcagagagaaactgccaggctcaggtccagtatgctggatcaccatggggtatctcctgccattacacattcccaccatgcaattgtaattcatctagcaacgagacaaggtgggataacaaaacctgtcacccaactgaggggtgtgccacagctaacacaggacaatgtaccttctattgtctgataataaaaatcctttaaaacatgtactgaaatattttatcttttctggaaacaaatatggagtctataccccaggctttctcgctcagtggacaaagtatgaatagatatgaacctttaaacttcaagcacattttggctttggtgtcatgtgccacctgagcaccccacccccaccctgcccagtacaatcaaagtattttgaagagacagcagttaattgaacactgactagccaccaccttggctcttccataaacaagatgacattggagatattctgctttagtaaatgacaagtcctggagtttagatatggagacatcctctgtggggttcataagtctcctgacacaggcaggaaggaaagaggcttgtaatccaagatcaattcagtgtctgaattctttggcatttgtcatgttagctcagcagagctcagatgacttccaatagttatcttaacatagatttttttcctcacgagggtaaatcaaaagatttagaaaatcaaagccagattcccttggattgtctcagaaacaaaacaaaaggaagctgtggagtggatgaactgggtggcttgttttcacacatgatgcagtgaccgttggcgtgttttgtttcatgtacccagtgtctatcagcagaaccatgctatgatgccatctgggggagtatacaaaatgatttcagggcacgtaagtttgtttgaggatctaagtaattagagaatatttggtgttttaatttttacacatttctttacttagcgtgcatgaaagagaggaagagagaacacatacatatctggatgaggctaacttgtacgcttggcagtatatgggagcttggcagtatatgggagggggtgcagtaaaggaactgcagcccacggtatggttaagaggaaggttttattgtgaataagagagaaaaaacatccagatgtgtcaggaagaatccagaacagaaaaagaaagcagatgtagccagggctatctgctagaggagggagaatagcaagggggggggggggaaccctgccttcctgaagtgaaaaatgggtatctgaaaggaagggaacttggggaggtgagaaggctagcctgggcttcgaaaggtctaacaggtactggccttcagggactgagggagcctggaggccatgggctttggtatgcaatcccaggtgcatgtcaatggtcccttcctccagagctaagggagggctccttggcagatgggaactgggttcacaaggtcatttcaaatgacttctgccttagtcactcttctgttgctgtgaaaagaaagcttttaaatggggcttgcttacagtttcagtgagtgccttgtcatcatggtgggaaacctggtggcaggcaggctgggtgctggagaaggactaagagtgccctcaagatccacaggtaggagagagggagagagagagagagagaagagagagagagagagagagagagagagagagagagagagagagagagagaatgactctgggcttatcatacatggattttgaaacctcaaagtctatccccagtgacacactttctccaacaaggtcatatctcctaatccttttaatcctttcaaatagtgccactccttggtgacatccaaataaaggagcctctgaggtctttttatttaaagcaccacactggcttttatctaatcacctatagtccatttgaactcatttctggatatatggactgcctgagatctgacaggcagcaagtatttttacacccagagccttctcatagtcctggataggttactgtcctggtcggtgtgtgatgtggaaactcaggttttcatataagtagcctagactggatcctacctatgcccataaataaggcaagcttgtgcataggttttattgtgttcaggtgtttctttgttagaaaatacagataataaggacagttgtctagtgggttgtggaaaacagagaaagtatgcttggcagagaacctgcctgtgcaaggctgcccgtgtttcaaccgactgcactgtctatggcagccatgacctcgtgtgattgctctgtgtgaccaaactgacttaaagaacaggtttccataaggttggagtccagaatagcaggacagactgcagcaagcaggcatagtagctggagcagagtgctgagagttcacatgctgaactgaaaacacatcatagagaacaagctagaaatgctattaaatctttaagctttcaaagtctaccaaacttcctccatctagggcacatctgccaaacctcctcaagcagtatcattaacaggggaccaagtgttcaaactcaggagcctacaaccaacattctcactcaaagcacttgattctcctccctgacccacagaggctcagggtcatatcacacagggcaatgaccatgatgttggtcttcccctgcggctagtatgtgcatatgaagagtcaatgaatggaaagtgctggaaactgtgagtcacacaaagcactctgttcaggtgtatgctgcctgaaatatattgcaatagaagtagaaggaggaggtgaagcagacatcaagacaatgtatagggtattttcagtgcctaataaatgatggctcacttctttatctattacattacatctgtgtataagatggctgtggctgagaaaagaggttggggggaaagagaggaggcaaagagagagggatgaagagagggaggaaaatgaaagagaaagagaatacattcccaaataacataaacagtataatttttgggacaaagtacatagaaaaattaaaattaatcaggcagtggaggggtattcttgccactatatctgcattcaaaagaattcttggttatgtttgtttagtgttttacttaggggattgactttgctaggttttgttttattttcaattgagattgttaaatgttttttagtttggctggttagttgttgtttggttggtttggttggttttgctgttgttgggtctttgttgtggttgttgttgtctgagccagggtcttattatagtgagttctatgacatccagggctccatagtgagacaaggtaatcctggaaattgttggccagtatgactcagtcagtgagagaccttatctcaaaaaataaggggggaagcaatagagaagacacctgagatcaacttctgaccttagtactcaagcaagcacacctgcacacacacacacacacacacaaatattatccataaaataataaacaacaaacaagcaaccatttacctgtcatatgaggatgcaggccatgtaaaggaagggattaatttcctgcaggccctgaggggaaaatgagccctggaagcctttaagaaaggagtgaattttcagataaaaaaactgcctgtgccaggcttctgagtcagggcctcttagtgagacagcagaggggctttgactgatgggtggactgtggtgggagatgaggttagaaaggtggagggacagcctggcaggactttacagagcctgggaaacattctctcttgtactaagtaagacaggaagcaattaaagtgttcagaatagaagcacagtacgatctgtggctcatcttaaggggttactctaggccctgaaacatattaagagtttgttgcagtatctgggttgaaaagcaatggctgctggaagcacatcaggcatgataagagttgagaagaagtgtggctgtatgtctaagacagagccagcaggagtgcctaggcattagaggtagagtgtcaaaagtgcagaattaagacgctctcaaaatgtgtggcctggggatccatgactgccatttgctgagttggagaatatccctggtgaatcatgttgattcatgtccggaaatgggagatgtaggattaggaatttcatttgaataagagtttgagctgcctattagaaattcaagtgttgatgtcatgtagacatcaagaaaagtaagctggcattcatgggcaaagtccagctggaagtcaacctttgaacagctaaggctacttaagattaagtggaaagaaacatcaaggagagcataaagaagcacagacgctggggctgagcggtcatgctcttcgacatccgggagtcaggcagataaaacagctggcaagagagacagaggtagtgtccagtgagagagaagacacatgaggggagtagcttcaacaagcaaatcaaataggaagtcaagtgggagacagaacttacctatgccagtgttgcagggaattaagcaagtgtggtctgattgttgatatgtgagagtggcaaggtcattggcagtttttcatccatcagtcacctgatattaaagtgatgccatgggaaaaaaaacagcaagatcctaatctgtagtgtttaccaatttccataatgtcaacatacacatcacagtagatttcaagttaccactgactggtacagccttgaaacattcagcagttggctctcatacactctcatacataccaacagcacacaaactggaaacccttggtaagctgctttggtgaacagtgggcattgaatagaaagaggaggacagggcaggggtggttagctctctgcctgtgtgtacaagcctggcattcactcccaagcatgaaatgaccacgactacaaaagtaaagttttggaggcaatgagtagaggtattgttaaggagttacttgctaaagaaatgaagtagcaactgaataaagaggtatggtcctgagatttttttttttataagagaatccaggtgtggtagcacatacttggaattccagtacttgtgaagctgaaacaagggggttggcatgaatttgagggcagcttgagctgcagagtgaaatcttgtctccaaaaataacgaaggaacagataaacaaatacagacacagtattgtgtttatgtgcaggacataatgatacttttacaagatgaaggatgagaaaatggtgagacttgctcctggaatgtaagaggaaggagtttgaatgcacaaggagagatgttaaggcctcaggtaccagcccagagtagaactacacactgcaatagaaatatagtgggagcaacagacgtaatcgacctctgtcttatttttctttgagaaaggtctctctagcccagtctgatgttaaactctgtgtagctatgacagtcagttttaacagtcagtttgacacaacgcagagtcacttgggaagacagtctcagtgagggattgtctggatcaagctggcctgtggacctgtctatggagggtattctagattatattaattgatatgggaagacccaagtccaccatgggtgacacgattccctgggctctgggttctggactgtatgagagtagagaaagtgagctaaacactagtatcatgcatatattcatatctctctgcaaatcttgactttggatgtgatgtgaccagttgtttcaagattgattataatctagagttgtgagctaaaataaaccatttctctccaaagatgctttttgtcagggcattttctcacagtaacagaaagaaaatcagtacagaacccaaggatgactttgaatttcttcatgcatctccaagtattatgattataggcatatgccaccacaactagctgcaacatatgttatttgaatttgttagcaattgcattaagagatcagtgactaaaggtacttatcaccaagatgatgaccagagttcaatccctggaacccatatatagaaaaagagagagctgatctcccaaatttttctctgacctctccacgcacacagtagtagtgcgccctccctacatacacacagaaatcaataaataaatgtaatactttttaaaaattaaaagcagggaattaatttatttacttaaccctctacatatagtttcttattaaaacacatagtgactacaaagcatgaagtaataggagattccatgttcgtcttcttattcagttttcaaaacctactattttcttcacaaaacacgtttctccttaggctagatcaatttccggtattctctatcatcaactgctaaagtgaaaaaaacaggcatcaccagtgtttcagccaagtgtgttggcagaaggctataggaggatccatgtctcttattttcttagtgaagcaggagtcaagttcaccaggcaacagagagcaagattggatgagaagatgctggaggcttaaggagagaaggaacgatgagaggtagttacagggcagaagaatgtgccaggcttggtgtaggaccaatgtccactgcagtaaatggtcagaagttaaaatgagactgaccattccaggtgtgtgttcttctttgagctctgtcatgacagggacagaggtatgtctgcaaggacctgcagtatggacaaagctgggtttgaatatgatgagattggtcaaaagactgtttccaataaaaacaaaacaaaaccaagaacaatggaaagccccattctcctggagggagtgtgggtttgtccctttcttacctcagttttctggaactttgttgggagcaagtatgagatgctaagtgaaggatttagggattctgtaaaatgctatcaaccttgtttctttagtcgctactcctattttagaagttcacttttagcaggttctgtcaactccttctcccaggtcactatgctaagctgtgttctgtgccctttctctttcctcacaagtcatacactgattaattactttggcatggtctgattgtgatacataaaatgggtgtacagcactgactccccacgtggtaaagcctagatgttaatgaaggctttctgctctctgcctgtaacctgaagctgccagtcaacagaacaaatcagaggctttccagccacacactgaggtctttatgttaggaggatcacacgaggtttttgtctgcaaaattcctctctgtgtaattattcttttgatcaggctacacttgaaaagaaaagagactgggtataaatcatgtccttgtttcactggagttaaaaaatgagacaggacgggagtctgtgaaggtggtggtctgagggcggcagttctgtgtgtttaatagacagcttctgggcatttccacgagtgtcctcagggcaggtgatggatatcatgttggtcaacccatatgaaaagccacagccttatacttgtccttatagaaaactcaatcagaacttactcctatgttcttgtgggcaaagctcattgtttcccatcaaataattcaggcacatttccctctatttgaactttcaaatgcagggatttacatgaaattctgagtgttaaacccatactgtgcttaggatcacttttggaattaacagctcacagagggacttcaaaatatttttatgtttcttttatatttattctttaacaatctttatatgtgtataatacatttgatcatattcacccctattaccctctcttattccctcacaccaacttaaccttttcttcccaggaggtagaggtgtgtgtgtgtgtgtgtgtgtgtgtgtgtgtgtgtgtgagagagagagagagagacccaagtttaattagggttgcttgcatgagaagcagtgtgagttcacttaatggaatatgagcaacttaccatggcttcaacactaaagaaaatgattccattccacttagtagccattaactactaatatctcctcaactagggatgaggatctaatgaacccttctcccatctatgctataatatagatgagtctaatcttgtatgggtcttatacatgtaaccacagatgcttgagttcataagtgcaatgtccctgtcaagtccagaagacggcatttcacagtatccttcccatccctgggctcttaaatagtttccactaccttttccacaacattccctgaaccttggacaggatgatatcgatgtcccggttaggactgagcagttacgagtctctgcattaactataacccattgtaaaatgagttttctcttaccaaggctaagagcagtgctaacctatggctataacgtaagtagctagaaggcagtttggcaaacatcagtggtagatccctcaaaaggagactttgtaacagcatttgagaggtagaatatatgtcttctctgctctgtgacaccctagacagcatcaatcactcaatgctgagtttccatgtttttgtatatgatgttctctgacattctgactttaacatctttctagtcacaccactttaaaacaagtatacacccaaggactgcccaaacttaccctgtgcaagcatcatagattgtgcttctgtaaaccgaatgggacaggatgtcaccttctgggaccctgttatatatgccagccaatgttgatcaaactacattatggtactcagatattcaagacaaaacaaatatctgttgaggaagtgaagaagatgctgtgcacaagaagtggccttccatgaacttattatccttcttatgactctctatccttgctttaaggtttattttatttattttattttatttctttatatggctttacctttgggtctctttcatgaatctggagacttctccagtacagaggccatgtttgttgtaccttccaggatgtatagtaccaccaggtgcatgataagctcttataacttcactaaccatgaaatgccaaaaattgagtatcatagtgagttcagttgaagacagaaacagtctaagtgaggccacagtgttatagacctactaatgccaaaatcagctcacaactaatgtgtactgataactctttccaccagctgcctgggttctgttgcagctttagggcccccaaataacacacagagtcttatattagttacaatgctgctagccaatgactaggatttcttatttgctagctcagtcttaattatcaaccataactactaatcaatatatttttaaaaggacttgtcttaccgaggacaccagtcttatgtgtcctctcttcctgggatcacatggtgactctctcccttccctacatttcccagaatcctccttctctcctaaacttgcttccctaagacaaccatatacacagaaggacctcccccatcactaatgtgatccattccaaatgcaacttcagtgtgagcttacataatggaagtaaccttcaacccgttacactcaggaatcacactaaaaataaccaaagagttaattcacagatcacttcactgtgaggattttaggggtcaaaaagttttgcttatagtctgcatacttttggggaaaaacttactagttctggagctccttaaatttagtatggggggcggcatttgctgtttgttttgttcttataaattctttaggaaattcacttggtcttttgagagattctttgaataattttgcatgtcaaaggaatattggatttgttgttgctcagttctgtcaacctcttgttatgataatgttcattcaccattcctaaagtggagtatgaatgtgttgatgatctgacatgctagctggcattttaagataagtatgttatgcctcagttagatgaatagatgtttgtcatgtgttgtatacaacttacttctttcccttgactgtattgccaagcaataagcatttgacagaggaagggagacggggagggaaggtggtgaggcaggtgaatagtggatagacaatggatagatggatggaaggatgcatgtatgcatggatacatggatgcatggagcatggatggacagatagatgcatggatagatggatggatggataggatgcttgataaatgaacaaatgcaatgaatagttcagtggcctgcatgctttgagtgttctagtgatgagttcaagttgtaggtttttctgcctgctaactctctggggtatagtaaattattaacaaaatcaatttctgtttcttcaatgtgtacttcttcagtgtgtagttcttcagtgtatagggttgtaacgatgaaagaacacatgcaaagaatgttgccttaagactggtacatagtaaggtctcactatgttagctgttattttcactgttgaagtaaccacgagtggctgtaactatagaacttgctaatgggtatactgatggttggaccttggggaaaatcagtatttttccattattatagctcaaggctttctatccacatgtatatggcaagtctcacaaccagggacagttacctctggacagtattgaaagaatcagatttgacatctttacacttcagcataaaacacatggctgtggcagcataagatgccatttctctgtgaagtttaaaatgtttataattcccaagtaagtacccttcaagcagacatgttttctccaaggtgacaactccagtacctggatggagcagtaggcagcacaactctcactattagttctagaattctcggccaaggagccagcacaaaatctaagcaaagggacaaggcacctgcaggctgctttggctcagttttccagaaaaatcaaacagaggaaggacttagtggagacttttagaggcccttcctgcttcccaagtggctagcagctgggccttgcttcggctgacagcccaaaagagatctgaggtgcacagctggggtctgccctatggcaataccaatggcattgaacttgagtcctgcctcctgagccctggaaaaccatagctcgactgcttaggctggaagccttggcctttccagaagcttggaccccctccaattagcccctccccactactgcccattgccttcccattggccggctggctgctcaactctgagacagttcacaatttaaatatgtcttcttttgtcagcttgatattttccagaattgagaagcggaaaagcagagaggagtacaaggaagctattaaggatacattaaacaaactctactgagagccagtgtgtgttgaagagaggatctgagactcctacaatcggcatttcgggtttagctagttagtctaacacagagggccagtctgtggctgtgtgtaagactatgtttgtgtgactgtgtgtgagtgtatgtgtatgtatatgactgtgtatgtgtctatgtgtttgtgactgtgtgtgtgagaatgtgtttgtgtgtgcatggctgtgactgtgtctatgagtatgtatgaccgtatatatgtgtaactgtgtgtatgtgtatatgtctgtgtgtgtgactatgtttgtgtgactgtgtctgagtctgtgtatgactgtgtgtgtgctgtatgtgtttgtgtctgtttatatgtgactgtgtgtctgtgtgtgtatatctatgtgtgtgtctgtttgtatgtctgtctgtgactgtgtatttgtgtctatatccatgtgtgtctctctgtatgtgactgtgtctctgtatgtgactgtgtatgtatctgtatatgtgtatgtgtctatatgtatgtatgttactgtacatgtctctgtatgtgacagtttgtatgtatgtatgtatgtgactgtgtgtgtgtgtgtgtgtgtgtgtgtgtgtttatctatatgtgactgagtatttgtgtctatatctatgtgtgtctctctgtatgtaactgtgtatttctctctgtatgtgactgtgtatgtgtctatatgtgtctgtctgtgtgtatgtatgtatgcatgtgactgtgtgtctctttctgtatgtgacagtctgtctgtatgtatgtatatatgtgattgtgtatctgtctgtctgtatgtgactgtgaatttatgtctatatctatgtgtctctctgtatgtgactgtgtgtgtctctctctgtatataactgtgtgtgtctgtctatctgtatgtatgtgactgtaaatctgtgtgtgtgtgtgtgtgtgtgtgtgtgtgtaagtatgtatgtgtttgtgtatctgtgcatatgtcactgagctgcagaagcagataactaatggaactaaacacaaagcagctctgacacacagtgaaagggcagctgactgaattcctaagttaaaagttcctgccagtaattcagtcaaccctgagctacataaaagaaaaatttaaaacaacatagaattgaagtttaaccacccaacctttaaatgtgcagccagagtaggcaggcacacgtagagcgggctgaagtacgagaccagatcctgactcttggtggatagaagaatccccctagcctttcttcctctcactttctctttggccacccctgtgccagaaacagctttctgtctgtttacgttaaagccttggtgctgactttcttcttcctccttgaagctgttttgtgagcaggtgcagatggctctcatgatctgagtgtgtggagactcttcagcttacagagactaaagttgtaggaaagcaatgaccatactttgagcggtacctgtaaggcagctggaaaacatttgccccattttacaatgaaatctgccacttctgtttctttcttttaatggttttggtttgtttatggccttaagcaaatcttgtcactaaaatccaccctggccactcctccagtgtttttcagtctggtgatttcacaaccagacccattgcaaaacaagggtatgggcactttaaaatctctggagattttgaagactctttaaatattttcctttcttgtttttcactgtccacaagtaaagagctgcagggggattcaaagttgtgggactgccgaacatttccataagcaaaatatgaaataaaccacttgaatttttaaaaattaatgtgtgtaagagagaggagagagagggagaagaaaggagagagagaaggaggaaaaagaagagagagaagagacagaacagagaaaggatagagaaagaagagaggaaatagagaagagaggatagagagagaaaagaaagaggaaaaagagaaagagaagagagagatggggtacacacatgcatgccccaatatgtatacaaaagtcagacaactttgtggagtctgttctcttcttccaccttccagggactgaactcactttccaagtttacaccattactccagcctgctatagactgcgtttaagtcttattattttaaatcaagcaatagaaagtggagaacctggtgctcttggttctctgctcagacaatacccacccaggcaccactgtaaagccataaactagggaacccaaaccaaaagtcagaataccactaatctgccagactctgaactgaacaaaacccaagtattacttactatacctgaaccaagaatatatccaaaaatagatcaaaggaattggctcaaaacagcaggatatttgtgtatgttctaaagtcatagaacgtaaaattagaatttaaacaaattccacaaacccattctaaaagcaaccaaggggcccaactgacttgatccagtggcttttctgagatccagcaggatgtaaagggtttggattatgctgctacatggacctttcctggtggtgtctttctgagggacacggactcagtcagccagtgataacagaatacctgctgtgttttcttatgctcgtactgaggacattttgaagtaggtgactcttgtacatatgatgtttcatggtgtctctggcctccaccaagaattagcatatcatcttctctgctccagtgagagccctcaaacaatgtctgcaaatgtctctttcagggaaggggtggggtgacccatgttgggaaccactgtagagggagaatggtcataagcccccacactgtttccagggtttcccagtagatgatggaaagggaagccatatacttatctgcttagaaggaccacctagtagacaataaaatacagttgccgaaagtcagcctttcagagtaggttggctggctaaagcaagacaccctttgtgtcaaaccaacaatgagtggtacttgtgggccacagacttgatgaaactacagagaatatttgaaaccatttggcgaatctgtacttcatagcaaccttacatcttaaagattaaagattccagggtcttttgaccacactacattcagtgtttaccttcaccgtctgaaagatttacacaaataaatatctcaacatataaagtctaacagtgtttctagctcgctgcctgcataccctacagtgacttattatatattagtgtgctattttaggagcgttagacatcttaattataacttttttcaaagtttgtgtatatatagtgtatgctcttgaaatggaatttatacttactctgagattttccacttttatataatataatagtcccctttcatgggcagttttcatttggaggaagactcatttgagcaccagagaattgtttagaacagtaggtctagccaagattataatgtggtaattgcacttaaaattgagccatgccaaagcattgcaaaaatactacgaactccactggatctataaccctgacacagacagctcatcagctttccctaatgctgtgaaaaacaaaccatatttgctattttttgtgtctgtgaggaaaacccagggagagagtaatcacagcagaaaactaagcagcagatttggtttccaaatgttgatttaatggtgactcagcgtcatcatttttgcttggtttctgtccttgagtgcaagttacaaacccaagtgctatatagcaatacaaaatgttgttggttaaaattccctcatagactgtgacccatgaagacagccatgaagtctgggaggagaaacagtctcttgatctcagctgagccctccaatcactgctcaaaatcaacagtttgcctgctttaccaatgacgaaagcacagtacaaggtgcttggagggctatgtggtggtgcaggccctcaggggagtgtgttggtgttcccattgggttcaataccttcaatgcagaactttggagttcaatcccagtgctgcagaattccagggttcaatcccagtgctgtagaattttggggttcaatcattgcactgcaggactttgggtagagaagtgcaaacagatatctcttcactccagatagaagacattgatgacttagcacagaaagcattccaccaaaccctgcttgggtgactcagaggcagctgcatctctgaaaagcctactccagtgcgtgctgactcacaagggcttcattcttggtgctccctgcacaacttgcaggcagctcctctgaaaaagttctccttatccagaatgattggtggtggtggtggtggtggtggtggtggtggtgtgtgtgtgtgtgtgtgtgtgtgcgcgcgcgcgcgcgcgtgtgcctgtctgtctgtgtgtctctgtactccagaggaaaggccacatgtcactgtgcctctttagctttgcagctttccatgttttcctgggcctcacatgctctcaggaggggtcatttagttttgaggatgaagctacacaaagaaaagaaaaagggaaaagttaaaaagatagtccactggggttggaggacaagacagagagtgatacatcggaacgtgttgaaacttacccacaaactatcactgtcctccattccactagataacatgactatgtttcctcagggagattgctgcctttattctgttcctgtgtagtaaaacacagactccacagggaaatgctaagtggacagttagtagccctaaacagtagccctaaaattctgatctgggattacttcctccttgtgtcctgttgcttgaatttagaaacataaattcaagatgtattcatttccatttgtgatacataaactacaaaccacaaagaagggtaatattccagtcatattccattctgactttttaaaattaatttttatttaaattaaaacaatattattttacatataaatcccagttccctctccctcccacccttccatttcccccacaaactccccatcccatccccatccactcctcagggagagtgaggcctcccatggggaatcatcaaagtcagtcacatcatttgggtcaggaccttgccccaccccggtctatctaggctgaaagagtatccctctatagggaatgggctcccgaagtccattcatgtactagagataaatactggttccactgccagaggccccatggaccacccaggcctcccaactgacacccatattcagggggcctggttcagtcttatgctggttccccagctgtcagtctagagtcaggaagctcccacttgctcaggtcagctgtttctgtgggtttctacagcctggtcttgacccctttgcccatcactcctccctctctgcaactggattgcaggaattcagctcatcagctcctggatgaaggctctaagatggcatataaggtagtcaccagtctcattattggggaagggcatttaaggtagtctctccattattgcttggattcttagttggggtcatccttgtagatccctggagatttcccgagtgccagatttctcgttaaattcacaatggctccctctactgaggtatctctttgcttgctctccctcactcaaccctcccattccctcatgttctcctcctcctgcctcttcccnnnnnnnnnnnnnnnnnnnnnnnnnnnnnnnnnnnnnnnnnnnnnnnnnnnnnnnnnnntccatttctgcttctggggaaacctaaactctgaaagttcctgatcctgtatcagaaatctttcctgtcaattcctgaagcaattgagctctgagaaatgatggcaccagcagcagtagctccacctccaccaccaccatcaccaccagcagtaccaccacctccacctccaccacctccatcatcaccttcaccaccatcacaaccacagcattaaccatctccaataggacctattagtttttcctgccatatcttcctggaaatcactcaggaagagaatgggccttggatcttttttgcctccttccaagtagcaaaccattcaaattccatgtttctgccagccagctaacaaaccagacagcatttattttgtggcagccacatgcattaagatgtgccacaccattgggcccagtgagttgactccgtgctgtatgttaacggatttgtatcttgttgtctcagcaggtgctgcttgcctcatcaaggagtcttttctttggttcaatcctggagacagtcttgactttttttttttttttttttttttttttgttttttnnnnnnnnnnnnnnnnnnnnnnnnnnnnnnnnnnnnnnnnnnnnnnnnnnnnnnnnnnnnnnnnnnnnnnnnnnnnnnnnnnnnnnnnnnnnnnnnnnnnnnnnnnnnnnnnnnnnnnnnnnnnnnnnnnnnnnnnnnnnnnnnnnnnnnnnnnnnnnnnnnnnnnnnnnnnnnnnnnnnnnnnnnnnnnnnnnnnnnnnnnnnnnnnnnnnnnnnnnnnnnnnnnnnnnnnnnnnnnnnnnnnnnnnnnnnnnnnnnnnnnnnnnnnnnnnnnnnnnnnnnnnnnnnnnnnnnnnnnnnnnnnnnnnnnnnnnnnnnnnnnnnnnnnnnnnnnnnnnnnnnnnnnnnnnnnnnnnnnnnnnnnnnnnnnnnnnnnnnnnnnnnnnnnnnnnnnnnnnnnnnnnnnnnnnnnnnnnnnnnnnnnnnnnnnnnnnnnnnnnnnnnnnnnnnnnnnnnnnnnnnnnnnnnnnnnnnnnnnnnnnnnnnnnnnnnnnnnnnnnnnnnnnnnnnnnnnnnnnnnnnnnnnnnnnnnnnnnnnnnnnnnnnnnnnnnnnnnnnnnnnnnnnnnnnnnnnnnnnnnnnnnnnnnnnnnnnnnnnnnnnnnnnnnnnnnnnnnnnnnnnnnnnnnnnnnnnnnnnnnnnnnnnnnnnnnnnnnnnnnnnnnnnnnntttcgagacagggtttctctgtggctttggaggctgtcctggaactagctcttgtaaatcaggctggtctcgaactcacagaaatccgcctgcctctgcctcccaagtgctaggattaaaggcgtgcgccatcaacgcccggccagtcttgacatttttaactagaactttgaccaaaacatattttcattttctgttttctcaagactcctgcaaccaaagcagatgcttatttaactggtttagataataactccttttaaagttgccctttacaaattctttttgttcagttctctttcttcaaagtgattccacgcactgttctcagctgatgacttgataaacttacctccccgtgtgaacacattcctgcctgaacaatccttcctaccagacacatgttaagttcacacacttgttacctaattcttctagcaaccttctgatcatgaataataacacactctcctgtagacatcaagtctctaacagttctgtctgcagaaacattagctacagaaccttagagggaaggggagggtgggaaccatggggaggggtgggaaccatgggagggtgggaaccatgggaggggtggaaaccatgggaagggtgggaatcatggggaggatgggaaccatggagaaggatgggaatcaccaatccaggagttgaactgagccttctttgtgaaaacgtttggagtagtgatactcacagtggtcatgggaaagccaccacagggacagcagtgagttttcatttgaaattgggttctttttctctggcctcacaaattgtttccagaggttagccacttacagaaaaaataaatctcacacttggaagtaaagaatgtgttatttgacttgaaacataacacatgtattccatggctcggtttgttctgtgtcggatgtctgaatgttgttccatgcctatatgtgaccccttcacagaggtcacatgtgaggtggtctagcatgagacacttaactcacagcctagcagggtattaatgaaaaccccggctaagctactacagttctgtattaattgcttgtgcccagagcttggtgcctcagttctaattctctttagaacattggtggcatgatacatgcgaaagctcttatgttactttaaccacttaggcactaatttggtggcatggaaagcatcagactgagtctttatgagcagaacaaagtggaatattgagcaattttccaaattttatcaatatagtgagtgaactcagttgatgttgctagctacaacagatgtttgagttcttgggtcaccatttaaacaaaaatgtttcttgaaatagccattggcttaacagtttcttttcattgcagtattaagcattctaagtattgagcaaagcataaaccatggaaatctatgagctgtgaagaaactatacatgctgtaaaggagtgtttcattttccagatatgttgtatgcacaggcacattcaacacatgattcttttaccaatgaagtgatgaattgcttcatcttgccatcatttacttgatctgtcaggaaaatttcacatggctattaggtgtgtgtgtgtgtgtgtgtgtgtgtgtgtgtgtgtgtgtgtgagcgcgcgcatgcgcgcgcactcaagcacatgtgtgcacgtttcttcttatttatttaaatcccctttaaatagttagacactctgtcctgcaagtaatgtctgaaccactctctttagtctaatcttgatattctgttttaaatttctcattggaagtttgaggcttttctgccctgttgctgttctgttccgtaggtttggtttgaagccacccatggcacaactaacagatgacctttgtgaaagtcctatggaaacttctgttgattgagaaaaaaggagaaaatgggttgtttactatgcaccagggaagatggctctgctcacaagaagctgacagcttaattagggagaggaaactcatgtgaaataattatcaaaacgaagtgtatgtgtggtgcaggctgtcagagccaaggataataaggtgttaattgtctgggttaggccatgagtctcaaaggacttcaggaaggtagagatcaacatgggctgaggtcatccaggaagactttccaaataaaaggatggtttttataagcctcttctattctcaaagcatttcaaaggctagagaggagtggatcagaaatgagactcacaggatgaggagaaggagagccaaggagagaaggtaacagcctacaaaatacagacatcggtggggagggaggggccagagagagtctcggctcagggcatcagctcaccactgctgctcttctggtgcagatatgccagtttacgtttcttgaaattcattttgacccatgcttactctgaaagatgtcagcatccagtttggaggtttcagagagggagggaaagggagaaggaagtggtgctgttcttcaggatttggggagataatcaagcagaaatgacagacggaacttacttccttttcttgcaaggtaaaacacacaagtaagacctgggtccctacacatgctaaagagtgtgtactctatgtggagctatccctgtggcatgcaagctgtttctggaaaagatggtaaccaagctcaaaatgctatctgccatccatagggttacttacttctctttgggttttgtaaaaaatatctcaagtggttccacttggaagccactttgttctgttttgaaatatcatgttttaaagtggagcgtatccattgttccttctgaattccatgtgtgcttgtctgcaatcaaaatctcctgctatggaaactaagaatcaataccttttggttcagagactcaaaaaatcccccgacacttttatttatcaggaagaaagaatgtgtaagagaaatgtttattttacagataataggacttcaggtttaaaatgatagctattatcattgaagtctggtgtgttttctgccccctctatgatttcacttttaagataacataacctctcacatcttttattttgtcaaggcagcagctagtgaaggatccacaggcttttatgggggtttgggaaacaggattgttcttgctgtactgacatttctttcatccagggttatgctaagtgtctaatgaagaaattgtaccatgcagaacatgccaatggcacccaagattttgacagaaagaaaccccatttctactaaggcaagagagctttgcctccatcaggaattctaaagtacctttgagtgtgataactcctgtcgcttctcctagtgccccagcactgcagcagcgaaaggacactcgcctaacttacacaatgctactaagaagagcattcttttcttgcagaaggagggaagggtttctctggtaggggaggggtggaaaccatgggaagggtgggaatcatggggaggatgggaaccactctctgaagcacatctgcagcctgcagcatagccatgataggtaacaaggtgggttgcttcattatcgaatactagaaaagatttgaaatgtctcttgggttttgtgaaaagtatgcttttttaattcatatgcattcctggttgaaaacaacacgataaagaaagctgtcattttccttagaacacagaaatttagaagaaattgaacaatgagtaggggatcacccaaaccaacctccttaactttgcaaacaagaagttaagcaaagggaagcaacttttgtctcaggttacacagaagttactagagagaggggagcaggtctacaaacctgatatccttatgtagtccgaaggacagatggaagaaggaagtccttgtagggcaagggtcagcaaacttgtgtacaaagagccagattccaaatatgctggaatatagatatagatatagatatatattatctgaatgattcatgtgtacccttaaagtcacagaacagccacagataatgtgtaaacaaaagaatatgtcagtgttactacgttaaaactttatttacaaaactgttgataggccaggtttgtgatgacctttcctccagatctaaaggagaaaatgagggcagatatcttggggagctttatgagcaaccttccaaatttgatctgtcatagagaatgccagcttctcatggctctgggaggtactgttagataaattgctctgactcaggcaaaactgactctttttatagctttcccaagaaaaggttgttcaggagggatttcaagtattgaagagtcattcttcaggattgtcctcctgtcactcttgttctagttacatatgtaagagttacgtttccgtatacctccgggacactgacacttactatagagacatcctgtgaccactgttattattaactgctgtttggctttaaaatctgaatatggaccactgtttccagaaatgattcaagaactctgtggctgaacagcagttaagaaatggaaagaaatgaaagacttcctaaatgtatataactgtgcaaaattgttcgtagaccataaaaacggttttacagttttttttaaagttttcaagcatatgtatgcaggtgtggggggtatggaagtatgtatgtgtgagtgtatggtctgtgagtatgtatggtatgtaagtgtgaggcagtgggggggtggtatgtgggtgtgtgaggtatgtaaatacacgtggaaggtggtgtcagtgtgtgtttgtgtgtgtgtgtgtgtgtgtgtgtggtatgtgagagagacagagagagacagagacagagacagaggaaaagagagacagggaagaagagataacttcataaggcaagtctaaggacatgccctgtggcagtagctgccctagaatgaagagctcgctgctcactacaaatgcatgctgggataggtttggtacctgagggatgagaatgcagaagttagagccgtgcaattttagtaaagcaaatctgcgacacagcatcctattcctccactcatgccgttgtttaaaaatggccctttagtaaccacatagtgtttgctggtctcaagccagaaacaagactaaatgtagtaaagaaagttagcagagagggaagacagtgctgattgaagcaagggattgggagaggtgggagatctaattttgcacgctcacccaccatcactgcaaggtcacacatctggctccctgctcctcttcctcatcactctatgctctgctccttgcttccctcctttgctagataccacacgacaggtaagaagacatcatgatctagaagaaaacaacctagttcttgcctatgccctgcttaatttctcctgtgccgagctgttattaggcagggaaagcctgtgaacattaacctccctgcccccatcaacattgctctggtgaaaactgtttctctctctgggaaaatttctggagagtatttgagtgaaaaggtgttaaataatttctgtaagtgggaactagccgcagcaaagctcccctctttaccatcttgctagtctctggaacaaattcagtggaatgtcctgcttagttctcaagctcgtttgctttaggcgtcaatgctgctcttccttctggctttgccttacagattggtgtaagtgttttcactgaagagatggcagcatccactccactgaagaggcagataattaaaagcttagtatatgtcttctgctaggcacctgtttgtgtgctgagttctgttaatgctcacagtttcaacttcaaataggaagactgatttctcccttgttgacatcaattcccaggtgttattctgaagggcataaaacacagatgacttgatctgagctgtaattctggtgtttcagtagcatgaggcagcattctggcttctatatctaccagtccaggcccttccttcactactgcctagcttccacataggaatcaggccctctcataggaccacaggccattgagaagctgcccccaccacaaggctcttttccctcttggaatttttgtagtacttttggtttatgccaaaaatttcctcacttaattatatgttatcttggatctctctcaagtggtttagagtgtactgttaagcacataatccacacagccttttgaagagaaagctcatgggtcatggccagcaagctatgtgatatttaagagaagactgtgagcacccacaggcaaggaagtgctaaggttaaatcctggcctttagactctcgaacacagcggccagagtgttgctccatcaagcaggctcacaagggtcccagtccatcagttctcattagcagatgtggttgttcagtgtcacaagacaccatgccctcaggctaccacttcacatgtcttcaggtcagctacatgtagccattgcagccactagcacttggaaagccttgggtcacgtattcaaagaatgagaacctaagggtacacctgccacggcactgggtgggctgcatgccaccaagggagggagtggactgtgaatagtacttcctaaaacgcttgctatcccagctggcattattgttctgtcactccctgtgatctcatgagtaaccaactttctcctcaagtgtcacgatttttatttcatggtttaaaatatacttgactagttgctggtttggtcttatttttagttggtgtgtttctgtgcacgagtacatgtgactgtgaatgtatatgcagatgtgtatacatgtgtgtgtctgtgtgtaggccacaggtcaatattgggtctatattgggtatcttcctcatttgctctccatttactttttgagacagagtctctcactaacgtggaactcattgtttctactagatcatctagccagagaactccagaaatcagcctgtttctgcttaccaaatctggtgttacagcacaccactcactgtgcttagccttttatgtgggtgctgaatatttgaactcaggtccttgtgcttgcacagcaagcacttagcaactgagccatatccctaggccctcccagttgattttctttttaaaatatctgcccctgtatagcttgtatatcatctcacatctatctttccttaggctttgtgtacttatgagagttgccttcctttgccttcctcagcgttgagtgatgaattacccctgcaactctggtgtaatgtccttaatgagatactctccacattatctgctccatattccagaaatcaacgtcaacgtatttgacactgaccattttccagtgttattaaagttaggaactgaaagataaagaagaaagagtccctttccttgggaacttaatatttacaaggatggtgtttaaaacaagtacaatcaagtgttttggatgctatcaatggggcactgaaggcaaaagaaagaaaaaacagatttgatctgggagttggtaagatttctcatgcagagaggtacataatagttaaattcccaatatttatattgtttggcttatatgttatcttaagtaacagctgaaatcaggaaaacattggtttctttttcaaccatgtctactgatttattgaattcccatgccctgtctgagtttagaacgacacatagctcattatttcctgacttactggacacagttcagtgctcattatctcatatgaccacgagaacattggatgtaaatacagagagaatgtggtaacctacggcaaggcactgggggcacagaggtgaggctttccctagctagacagatgtatatctgttgtgctcgtactgcacacattagtgtcttctcctcttctcatgaggatcacccacaaagaaatgcatagatggaatcacagaaccggaagaagcaggctgtaaatttcctatcagccaaaaaggaatcaacatagtgtgatgtggtttatccttggaaatcagaaagattcagatgcgcctatataatagcctataaaccatttggcatctctacctattcacttacccatctacagtctccatctctgtatagaggaagctatgaagttcatatacaacccactcttcccatgtttcattacttccttttcgaaaattcaaagtaagcatgtaaaccattgaaaaatagggccagcaagacagcttggtgcataaaggaacttcccaccaagcctgattgtcctccaaccttccacatgcatgttccccaccacctccacacaaataaggaaatggaatttaagcatgttttcaagaaagataaaataatatgtgcaatcccttaaaagaccattgaatgaagtacagaatttagattgagaagttgtaccaatatttgagaagaaaaaattttgaaaacacataataatggattttagtgtgtcttttaaaaacccagaagttttgcatagtgttaaagttgtatccatgttctattgaaatcaggacagactattccagactagttatctatctatagtgtcttcatgctgaggtgcctaggattttctttctaaaaatggaactagtaatactcatacttgttttttttattaaacagtccacatttaattaaaattcttttttaaaaagctatttcaattttcaggttattctattggggataacaattctgaaaatgtgctaagtgctgataaaaataacacctgcagcctcaacatggtgcttctccacttaagaaaaggcctctctggttctagaacatcagaattctgtaaatacatgtctgtttctcatgtgacccaccttcctgcctctcatgtgcatctgtgatttttgcagggcagaagattaaatgcaagtagacaccatgtaactggctttctctgcagccgagagtccaccagtggcttcaaaagagaaataagcacctgtaatgattgagaatttctgatgttgagggctgtgttgttgatcctggtcctgggaagaaaggctcgttctgatgtttattcttagtcattttttgaagaaaacatttgtagattggctagtgagttcatctgtatctgtcttcatgtctgtagttagggctcttacagtcaagatggacaggatgacagcagggaggttttatgacaagacacctgatactcatccagccaggtagaccaaggggacaccaagggaccctgggagcccctgaatgtggagggcttcctgaaggagagtagggctattctgcaggaactgacctgagcaaaattaaatagaaaacagccgcatgcctctgcaatctatgtaagatgtggttctagggtgctcctgcgggtgtcttcactgtcaaccttccctcttgctgtccgtgatttcttggtgcttcagaaggaaacagacttttctcctctcctgacttatctgagaaattctggcaccagccaggtttgagatgttttgttcagacattcttaacttgtttagtaagaagtaaaagtctttgttagtttttttttttttcctgcctggagactgctttttctttttgcttcatttaaaccctacactgactaaaaaggtctgtatttctatagcttgccctatgaagctctacctttggaggtatgagaataaagaacttttatttttcaacagaagtcaccggactttcagaaaataattaatacatttaaaaactatcaaagagaactttacaatctaatacatggacatagtcatataaaagagagcctagctcctggggtgcctatatcagcagacttccaaattgcttgtgaatggctagaccatgcccccccccttccccagccagccagcagccgcttcaccacaatggaattcatggtcacactgttaagacctgatgaacacgtgagggtccaggagccaggacctttatgagagttaggcttgtctagtctggtctggcctggtctgatctggtctggcctggtctggtcttgtctggtggaagtgactaagcaagccggtgaaagccttgcttagtgtgagggcttttttagtggccatgatttcttgtccaagaagctgaaatgtccaaatggggggcggggcaagattatgagtggccattccctttcttgctgaacactctgctaattggagcaggaagtcagcgctgcagggctgttctgggaatagctttgcaagtgagggaagcggaaaggcttttgcgttctcctagcctagcagtcagagaagctgtccgatcctgggaatcccgtgtttggcaaaggggaaaagcaacctacattaaagcggtgctagtagataggtaagaaaccaaaaattcaagctgaggattatggacacaggggttcaaggaagctcatgccagtgggaggggccaggccaaaggtgaccagcacggattcctggagaccttcctctcctagttgcctggacaacaaaataataataataatgctttgagaactaagtttttaaagacttcatttgctgaagatgggggatggtgataacaatgcactcttgtgagaggttaaaactaatgataaacgcagccgtgtgcatttctcacatacggcaagctaatgtggacattctgctttatctccacttggccatgaagaaacagagcattcgaaggatgaacatatgtcaaaggtcacacatcactgattctgtgaaatttttttggtacataacgatttgtcaggttcagcctatatcaggtccaccaattaaacttaaattttctttgggtttcccaaatgaatgacacaaactcaatagtttcatgcaattaaaaaaagatttactttatttttaaattatgcatatgtgtgtctatgtgttgcgttcaaagatcccagaggtgttggatcccctgcagccggagggacaggtggttatgaaccacccaacaggatgctgggaatcaaacttggggtcctctgaaagagcagtacatgcatgctcttgattgctaaaccatctttccagccccatctaatgtgattttaatgtttgttttctgctgattttatctgatttttcctcagagggttaatgagagccaggactgtgtctatcattgcattgcagtttctgagattacatgctgtccaatacttcagtaaatgcatttttatgacaaagaaaaggaaggaaggtagatgtcagtcctgaagatagcaagagttagtggattttagccactatgttcaattaggaattgacattgcttgtaaaagatcatatcttaaatatattacatgagattggtaatagattcacttttaattcttgctcagtgaagccttttaatattccttgaaactaaatggaaaattttccaaattactgcttggcagtttggcatgtggggagaaaatcgcttccctctcaagcagcttttccggggaacagattagtgttaattaggggatgttttactgatggaatatttttcttaccattaatgtcactgtccctcttcctaagggtggtattattgacagtgattgctttcacaggcagaaagaccatttcacagaattctagtcatctggcaccctgagacccactaccttttacttaaaagcctaaaactgtcagttttcacattgcttgggaccctacctgttaaaactgtaattaacctcaggccttttcttaagttccgctcaaatcccttctccattataaaaatcacttattaagtaacttttctcacagtaagtatataccaaactgacctgaagcctcatgctgtctggtaagatggcaaaatacaccaagagatgaagcatttgaaatatgactggctaataagcgtttgttaagtatattattgatggaatgagtgaatgacagtgggcacttctgtcacatggaggtggttccagggcacggtttcttggagaccagcttgggttttgtcttaatttcagagattaaagatcgtggatgtaaaaccatgactgccaacagtgagaacactcataatatactgtgtacctgtgttggttctgttgtagatgatgcttaactcccaaattagcatcatgggatagcagcccttgcccatctgattcctgaggtctcagtgaggccatctgctaccataggaaggtttgaatggctggaagctctgcctctacattcacttaggtggcccttggcaggatcctgagcaaatgaacatcctacccactgacagtaagcaaccctggaaagatccatgtcctttttgaccaagtctccctgctggaaaaccattgcccttgctcctgaacaaggggagatgataatgagggggtagtgagtttctaccttttgaaaggagaggcagacaagaatttgtggacattgaaaaatcaagagaatatgtaaatatggaaatttgtttgatatatttgcataaattatctgctattttaaatgattcagtgtttcccagtgttcagtttgtcaataagtgtttttaaacaaagtacttttcctggaaattagcaaaatgtcttccaatatgcatgacgccttctaaaaatgaaacaaaatcaaagcatttaggatcataagaaagaaagaattgttagttgtttaagaaaccatgtaatgacctgattctgtttatttatttttccttttgttcctctgaagttgactcaacaaatttaaatttaaaacaattggctgtatcctccctgtactaaactgaatgtaaatgggtgtagagttttttttaaaaaaaaaaaaaaaaaaaaagacacagcatttatcgcaaagaagcagacagtgcagaggagacaaggacatgcacacagaactgtgtatctgggtcactactttaggctttataagagtaacgggggactgctatgggaacacacacagagagaaaatatctacaaaaggtagaggttgggaagacatcttggggaagcactgtttgaagttcggaagaaggtatccatacaaaagatggcattgtgggagtaaaggtgtagagctgagtagtgtaggtctcctgggggaaccatagtgaaattgggggaaggctacacttctagaatggaaggatacactagagtgttaggaatggcttaaggcccatgctgggtagtagagttagagttttgcatcagtgaggaaagaacagattaatacttaggagtgtataacatgataataacaacagtttacttcctgatcactgtctctaagtatattgcatgtgtcatctgcagtcctcactagtcttaggggtaaaggtgttttaattactgcctcatgggaagcccaggcctttcaactgaaccaattcaccctactgaggattgggatatggcaaatcaaacccagagcaaaacttgatttaagaaaaaaatcaaagaatttaagtttgggtttcttattctttcattcctatctgtaaaccaagctaccatgtaagagaaggtcaataggggaaaatcactttagttgccccctaaacagccatggttagaaaagcttttggaagacagtactactattagctttctaaaggaaggaactatctgggcaaatctgcgcttgtggtccagactgcatatgtctggagaataaacaggtgtatatcagacaagcagttaaacatcctgcctgaagaaacacacacccacaatgaggaaaatgggacacatatggaaagtcacatatgaaagacacatatggaacttaccacaataaccatgatgatacacacatttattatcatgcaaacatgggtattccctgactgggttggcgatgcttccattagttaataacatgaagccacacacagttagtgtagtagtaattaatctgtagctttaagaagatttattttatgtctctgtgtgtgcatctccatgtggggatatatacacatgagtgcagtgtccagagaggccagaaagcatgtcagaactgccataaatgggttctgggaaaagatctgcctcagaagccacaagcacttttggcttctgcatcactcatgtttaatctttgtttctaaagaacccatactgctgttgctataacaaagatttttatgtaacttgctttctgtatgcaagatataaacttctcattgtaaaatattaaaagtaaaatgtgagctggagatttagctgaaaggcaaggtgctttcctagtataaaaaaacgccttgggctcaattacttttatataaaattaaaatatatttttttcataatctacacagcttcagtatactttaaccataggatataaattaaacaaacataaaaataaaaattatttcctgtatttacaggctattttcttaagtctataattttcagcaaaatggaaggtacaatgcaaaaggccactactatgcacaaaacttaaaacaaaaataatttaaatgaagtgaaatgtgagttttttggaaattaatcttatcattgcagaatttttataaaaataagctaataacaaatctagcatgctctattaaattgccattgaggacatacatgtgattaactttaggacacacaggcattgctttaccttgtaaggttttctaccacagcaagcacctcttgggaacatcatgctgccaggatgttcatcctgatctgcagattagaacatggaagcatcgatggagtggatacttgacactgctgaggactggtaccttggctgtcatgctgaaagctaagacttaagaagctaattcatttgcctgttcttacctatgggatgctgcccagctccttcctgccctcccaaagacctgtcctttgacatgttcactgtggcaatcagagaaaaactttcccagattaggggaagacattgtgggttccaggaaggcagcaggagcagagggaggcttatggtgctgctcatgaggcagaagctgagggtgaccatgcatctgaacacctttccataaatgtatttcatgcatgttcaagaaacatggagctctccccagaagaaaatttgttctccaagaggggtgctgtcaccgctcagtgttagtttgagctgggggttataggagctaccagctgaccactttatcttcaaaatgcttttcactgtgaaattgtttgcttttaagaatgtcactagactctaccagaaacaacaacatagcctctgcatgggtccatgtgaagcagaaagtgggaacagaaagggtggaatacagggagtgactttgttctggaaacagaggtgaagccagtgggaaagagaaacacatggaagacagttaagagagctctagtcaatatggctgctgaggacttgttgtattgacctccccttttgcttgcacctgcaaacatggcaaatattagctgctctctgttaacactgaatatttctgagactggaaacttttggtagaaaaagcaggaccataaagcactaaagtaggtagctagttggaaagaaccaccactcagattttcgaaatgctaaggggaaaacaagatctcaacaggatttgggtttgtgactgacaactactcttacatagctccataagtggctcatggccatccaggcatgatggtgcacacttttaaacccagcactcaggaggcagagaagtctctgagttcaaggccagcctggtctacagagtgagttccgagacagccagggctacgtagagatcccctgcttaaaaacaaacaaacaaacaaaaaaacacaaataggaaggggatttcataactataaatggttcatctgtgatgctgaaacaatattgtttgctatccccagaggaataatgttaaaggtgtggtctctaacttcagtaaagcctggtcctttagcattacattgtttccagaatgacagaggacacaaaacagatgattcacactgaagggctataaacatggagatttgtccatgatgtcagcacagaggcagaaggaaaagcccagaactgtctctgtgttttgatggacatggaacgatgaacatgtcattcctcaggttttgcagcaaagtcaattaaccgccttaagtctaaataatcagaaactgaaaaatcctttagtttgtaccaacatcttccagagccagcgttgtgagctctgttgtgatgagttgtttctcactgtgaatgtctgctttcaaaaagtcactaggtttttaccagggagaaaaaacccacaaagattctacatcaaagggcaatatgttacctcaaagttcaggaaatccctgcagtctgaacacctgtccattaattgagcccacagatattcaccaaaggctactgacgaagatggcacaatgtcctggtacaacactgtggccagagaccatgaagggtttgtggtgtcatcaaagcacaaggggccagagtacagtgcatggttttcctttcactttttgtgtaagagaacttgaacttagtcattggaaataaacagtgcagaagaacacaggtaaccttgatccttccatctctattaatgtgtcctggtattaacaaaatcccagtattccttggtagtatgggttagttccaaactcacacacatactcctgcatgccaggaaactgatcttgtttctaccttgcatttaagacaaagcttgtcggtgcagctcttagcggtcacaaaaggctgtatcataggtatgactgatggttggagtaaagagtcccacttagctttcaagttctgcaatatcctcactgataacagggaggtaaatgaagaggaagcaagccttcaataaagcaggaagtgtgtggtgagctggcatcctcggggtggggggctccatatgtcccatatcactaaggaagcagaaatccaaggcaatgctttcctgcttctcacataatcccaaacagtccaacacagtgcctggaatgtgtaggtgtgaatgggtgtagagaagcaaggtcactcagatgtccctagtgatgcttttctctgtgggctgctggggacccagagcttccgatgtctctcaggcctgttctgcacttactctctacaacctgctaaatagtgtggaaggggtgtcaacaacaataataaccatagggtaggaaaatgatggtgatgaacctaccatcagttagtcatttaagatttgtcatgacacatgttagttacttttcttcttgctgttacaaaatactggacaaaagcaacataaggaagaaaggagggtatattttgattcacacctttggagtataggccatcacggtggagaagggtggcaggggatggcagtgggggccgtgaggtggctgttcacattgcttctgcagtgggggacacagagatcaatgtgggtattcagttcaatttgtcccctttcacttttcattcagctaaagccagcccctaaccacccaggggtggtacattcaaggtggatcttccttcctgagtcaaacctgtttggaaacctcctggtagacactccctcgggtgcattttctgggtgactctcaatccatccaagctgacagggaaaagtagctaccctgcaaggttattgtctcagcattcacagcaaagctttctaagcccatttgagtcaggatggagaaggggttgagaggcagagaagcttctgataccagaactgttctgactctaagctgtgctgtaagtgctagccttccacctgtagttccccttggggaaattatgaccggacagctaacttctggggagatctgggagggctaatcttcagtgtctagtttgattagaccctgagccagatgactccatgggaccctgggagcagcctgggggatatgtccgctatatatactcaaggaaagaatagcccttaggaactgcacagacatataatttggagttctgatcatcatttagtgtccccagttgttggtttgccagagtaagtaagtaagatagaggatgcttggctggaattcagtttcagacaagtaattagtaagcaatattttagtgcagttgtgcccccgaatattgtagtgaaacaaacctatgactgaaaaaaatcattctttatttgaaattcaggtttaattgggttcttatatattaagtggccatccaacccagataaggattggcgggacaatggtgagctttgaatgtctttgacatatataattattcttcagcttaagacatcaggtcatttaacttccattcaataagtggtaatgtatcccctgtgtggtccaccctcccatgatgtgtcccaactcaaaatgaggcaggaaaagttatatcataaaagtcctttgggaaactgataaaatatctgttttctttaatgtcttaaatattcatccaagcaattctgaacataaaatactagtcatagttaattcacataagttgcttgctttacattttgatttaaaaaatgcaagtgtgccacataccctgggggaacaaaccagtgccctggaaactggattgtgaagtaatttccccattaattatgacagttaagtggggttcaccaaggaggcacagtgcccgtaggatgaattgtaagaatgatggctgtttgggagtcggagtcaaatatcagcctttaaaccaagccgaagcccgggtcacagctgccttctgtcactgacacagcaaaggaagaaagttcaaggcgcactcaagagtctttcctgatgcatttttttcagatcccagactttaaccaagacccccctaagcagaaagcaattatactcaccagtttaatgtttagttcatctgtagtctcttagttttaaaaaaaagattattttgaagagatatgttgctttgaaaaaatgcaaaactaaaatgtgaagtggggctgcaaatgggggcaaggggtgcattaaatcacatttagacacaaatcctccaggtctaggggacccgtagattatccacatctgacagacctagatggtttataatcactaaaattgttttaatcatcctgggcaagttttactgaaatatagggaatgacacggggttagtggttgttggaatgagaagtcaagaaagcaacgcatacattaatggaggctagtagtgcatctgaaccatggggtggttatcagaagattcctcgttctgtccacggtgacagtagcagctctgtaatcacaaggaaggttgccagctgttatctgccctcatctacttgtcccaatcttctctgggctgcccttgttcttcctggtgtttagagaaaaagaagaagaagaaggaggaggaggaggaggaggaggaggagaaagagaagaagaagaagaagaagnnnnnnnnnnnnnnnnnnnnnnnnnnnnnnnnnnnnnnnnnnnnnnnnnnnnnnnnnnnnnnnnnnnnnnnnnnnnnnnnnnnnnnnnnnnnnnagaagaagaagaagaagaagaagaagaagaagaagaagaagaagaagaagaagaagaagaagaagaagaagaagaagaagaagaagaagccaggatgcaaaagtacaaggagggcaagaatacattcttggtgaacattgttctctggagaagtgtgggatttaactgtgtaattcttgggtgtgcatgagccatagtctcgtggggacattgtgcaatggcaccaaggcaaagaggtgtgtctcatcacacctgggctcatcatgctcatgtcctgctggcattcagatcttcagataagctatgcattaactctgttaggagatttccctgagtgcagaagaaccagcactctaagttccatttacagcatctcaggggccagggcaagtgctagtatgatgtggaagcccaggctgatgggctataaaatctctgaacaaatattcattgcagcttgataggaacagcaatgtaacatctattaaaccagaggaaaatgattacctcagatttctgcatcctttacttagaacctgttggccttgttcttcattttacacccttgccctgctcaatcatcttctaacttccctttgtccttagcatctctagcactttgctccatggccccttatagcctgtgtgctttagctcaggcactgtgcctgctggaattccccctagtcttaagactcaattcaaaagtcctgctaaggggtcagagagtgtgcaagcatgaggacttgagttcaaaacccaaaatttcatgtaaaaagccaggtgtggattcatgtgcctgcattcccagcactggggaacagggaaggaactcacttggcaaggcagcctagctgaaacataaggttcccacctgtggaaagacactgtctcacagaaacagggtacaaatgagagaggaaggtatctgacatcctcctttggcctcagaatgcattagcacaggtgccactcccatacactcaggttcagccatcacatacacacacaccacaagcaatacattttaaaaatatcacacctccctcctacaaacttcccacttagagtgggtgtcctcctctatcctgttgcagccctatgccacaccctccgtgagaacacatggagcagcagcttccatgattcctcttctttgctttctcagagggctccatgtatctggagaacagactgtgtcttttctgcttttcattttcataactgaatttaataaatacacagggatgatgaagcacagagaatgagtgttctgaagtatgtaaccaaactagattccccgtcaggatatagaccacagacaggacactaaagaccagacagacatgtataaaaattcaaagttacaaaatgtaacagcattatcaaagctcagagtagcagcttacctgtaatccaagtactcgggaaactgagtcaggaggattcctacaagtttgaggacatcatggactacagcattccagaccaacctggcctatagtgtgagaccctgcctcaagcaaaacaacaacagacaccacagacacatagtacacatatacacagcacaccacacacacatacacaccacatactacacacacacacacacacacacacacacacacacaaagtaccagcagtgaaaattgcaatagttgagaaaatgtaaagcacatttctgtggcaagatggagaggcagcttcatgcagaaagggatttggggtgggctttgacagtgatattaaactagggagtctctctaggaggaccaccattcattctagaccttagggcacagctggaaaatagatgataaagagaaggccgtgtatgagtgcaggatatccgctgaatgcaagcgaagcacagctggatgcctcctttggcccaagcacccctaagaaaatgctttcggcaaccttccacacctgtgcagtcctgtggatgggtgcacatggcttcagcaagttaagtgtgcaactctgcctcagagtgtgcgttaactgccttctcctaaaacaacctgttctgtgctttcagtgtgtttcacattacaggtccacgtttgtgaagtgtttgagaatgctgcagagctaatcctgggaagtctgggaggcattcttggtgtaccttcattgctacacttcgactctttggtttctgtacctgaataagcccatttgactagagagaaaaagtgttcaagggagagggaaaagaggcaaaggagagaagataacaaaggattctaaggcacagagctgtgctgggcaggctgtgctcagtggtgggtgtgggaaaggaagagaaccagcagccacagacaggtggtggccaaactctgggagcttacccagtgaagcatgtatggggccatctgcttccacctaacttcaccacacagaacaaaccattggacatttctggtcttagatctacacacacacacacacacacacacacacacacacacacacacacactttagaggaactactgactggtggtgactcattcagaagccatttggataagcactggtaaagaaacatagcaagaagtatgagagagagagagagagagagagagagagagagagagagagagagagagagagaaacagagacagagacacagagacacagagagatgaggttgcagtccagaacgtgatgtgtagtatactggtgacagggacatttctccttatggggagggtggtgctgggggcagaaccttttcattggtttagccatcttgaggagagtggaggcctctcgctttgtttctgggctggaaccaagcctctcttccttcccatttaaacttcgtactaacttaagtggttccttcagtctacttcgcagatgattcattacttcacggtggccagcaggtgtgcagcttgtcctttctccaagcacacagaggaacataggaaaaatgcatcacttaggagagaccgatttttttcatttgggagacaagccaaaaaagtgaggaagctgtggaggtaaaactctcctctaagaagaggcaatgctctctctctctctctctctctctctctctttcctttcctttctctctcttttcttttcccagtttcagcgaccacgtttttgtttttgtttcttctctttctggtatatctggctggtgtatgcatgtgtgtgtatattcaggcacaaaaaggccagaggtcttcctctattgctttccacatttttttgaggcagggtctctacctgagttcactggttggctagaccatgtggctagtaagccccaggaatcctcccgtctttgctagggttacaagggttacaggtaagcaccttgcctggttttggtgtgggtgttggacttcctaactgcattcctcatccttgtgcagggaactctttatctgctccttcaactcccctgccctatatgcttctcctaaatcttccactgacttcctaactgaacctgagttcaaaatgtcagttcccatgaaagggcaaggcatgcacattcggaccactcttttaaaaaaaaaaacacaaatggatgcaattaagaacttaaagaagcaaagtggggtttccagcttttagcagacttcagctatttgacagttagtttctactgagacacagctgcctgcagagggtagttcgggtagccaactgctgctatttgagatgaaaaacttggccaagaatctgaaggcaagctcacagtgtacagcatgttccacatgactgtgagtctcattgggacgacaacagcatcaacagttactcgagctgggatggttatttaaaccttctgccttagaattgagtttgccgttgaccagcatcagcaaatattttatattttattgtctactgtcacaaaaggataggaagtcatggagataaataggaactaatgattctagagacatcatgccctttgtcacacttaactcttacagtaacccagaaaagttggtggggtttccttccctccctcccttccttccttttgctttgggaaagggtttctctatgaagcctcgactgtcctgaaacctgctctatggaacaggctggccttgaactcagaaatcatactgcctcaatctccccagtgctggaattaaaggtggtatgtgccaccaagacctgacttccttcaatttcttaagtatgcttgtttgtgtgtgtgtatgtgtgggagggtatatgtatggtatgtatgtgtatgtgcatgtgtgtgtatgtgtgtgtgcattatatcctgaagctcagagaagtacattgtttaagatctagtgatatacaaatggaagtgcttggatttgcatctaagaagtcttgttcttgactcaaagggaaaaaaaaaagcatgtttcagggccaatgggcagctcatcatattaaaggtggggttgccaagcctagtagtcagagttcaatccctggaactcacatggcaggagagatctgactctttaaagttgtcccttaacacatatgtaccacagtacacatgcataggcacacacataaaaaatgttacgaatgcatgtttcctctaccctctctgtttactaaacaaccaggatacagctccaatagttcctatgttgggaatactgtcttctagtttcagggaagcactctgtctttattgttcaactgctcatactacacattaccttatatgaaattctgagcactgccaagaaaatgagatgcaaacaccttcattatgcatatatgccctctctctgactctctcccttccctctctgtatgtgtctaatatatacatatataatatttcatatatgtatatattacaattgtgtccttgttacaaacagggaatgaaaagaattagaactagcagttgggcatctttgtcacttgtcagagggatctttgcaaagcccttgaacccaaagcatcattaacccatctgatctatctgtctggagactgcaaactatttcacatcttacttgagagccaaccaattgttttaaagagagaaatgcatccttggcggtctttctttaattgaaactcggggaatactgccctggttgctgttttaagcacgagaaagggcggggcttctgcagagagtgctggctctgtgtttcctgtgatgatgagcaacagaaaacctactctatccctggaatcttctggagtccagacaattcagcaccctcttgggatgagtaaatatcagtctgttcccaggaagattaactagttagatgaggggagaagcagctcctttctagagggctgaactttaactcccgcccacacgtcctggggcaaccgcttggatgatttacttagatggcattgtgatttctggaaagaatagatacttcattcagttttaagagtagcagtagtgtctttccgagacattacttttagccacaaagttaatgtttgctaatgtagacctttaaaaggtcataaagtaaagttgaattaggaaatgtgaactccgagtttcctcaggaccagccatgtgctcacaagcaaagtctaaatttcctcttgtgttttggaggtgggcaggcaccaatctcgggattccctcgtgctctcactcatattaagaaaagaacgaaatgaagaatattaggttttctggaggctagagtgatggctcagtggttaggagcacatactgactgctctctcaggctgcacaactccaggggatctgatgcctctgcctccacgggtttcggcatgcatgtgcatgtaaactcttgcaggtacaccacatacacatgcattttaaaaataaattatgtttttaaaggacattgagtgcttgggtagctccacagatcccactgagggctgcagcactaataaagccacaacctgtgtggatgaatttctgaattgtctgtggtgtggactgaaagcaatcctgcattactggatgcctctgagaagccaacaagatccctggaacacttgggctggaaagggtcaaagaattgttgtcaccctccctgtgtaaagtgaggaaacagaggccctggcttgtcaggcatcaatactcattattcatccacagcaatatgcctgtaagaatccgatctatgttgcttgagttatcatgctgcctcaaccattgggaaagttttatttttatcttattttttagttagttgagggttcttttcctcctctgaattagaaggaaggtcatattgctgactcttggtttcagaatgatgagtcattcatgaattatctacagtcttgttcctttctgcttcctgtctcctgccatctctgtcacagggctattgtctttctgccaccgcttgcaatggagactgaaagtagattaatttcttgttggcagccatgcctacagacagaaggctccttatagctaagcctgtcagcgacaatccctctgctttgcctcccagattgacactcgccccgttatggtttctttgcctaggaacctgaccttggtcttgtcattggagttttcttgctctccaaaaataattatttaaacttccttgtgaccaggtaccatgtaactaatatgtctgcaaagtcttcagggttagagcccaacttctttcccccttccactaagcagctgtgtatgtgagtgcttggatgtctgtggaggcctgacattgaccttaggtgttgttcctcaggagccatccaccttcagttttgagacaggttctctcaccaaccctggagctcactaactgtgtgagacttactggccagcaagccccagtgatcctcttttctctgcctccccagcactgggattacaaattgcaacccaacttgggtcctcatacttttatagtaagcattttgccaactgagtcatctcccagccctgacactgactcttaatactgttgtttaactagaagttttctcttaacctccagatccaaacacttcttggtgtctctgtgtcccaaaagcacgtcaagcacgcacacgcgcatgcgcgcgcgcgcgcgcacgcacacacacacacacacacacacacacacacacacacaccactttcttcccctgcaggtttattaatcgagcgttcttcagccatgcccatgctccatatccatctctcatattcattgtattttgcaggatcacttgtgtctggcatccctttcctgttactgttacagctgtgactcaattcggcacccatctttctccttctgtattgtcatagtagctccatagcttctcccatggtctggccctccactctaatctgccctctgctgcttccagagatcattttcaaagcccaaccttatcactctccatcatcagaggagatggcaaagcctccaacactgcagtccccgccacgctctctctccactgaacaggcataggtgtctgtgacctatttgcagtggcccctgtcattcctgagacaggtgacttgctcctcagggatcctgccaagcttctcattgtcacatgctgaaaatccacctgagggcctctgtaagggcctcttttaagaaccattctttttagctaggcgctacacacatattcttcattccatgtattcatagcccttcacatgtaactttatattacacttttacacccatctctccccaactaatgctcagcttatcatactgaataacaggccaaaagagtctgtccttaagtccatgtcaccttagtcaattagttagtgattggtacacaggaagaataagtatttcttgaatgagtgtgctatgacttaagacccaagtgatattatcattgtactttcataattaatattttaatttagctactcattccttgagaagtatacccaatatctcaaaaagtaataaaaaataccatcataaattccatgatgtcacatcgaggtgctaaaagtttagaattaagatttcaaaaagcattttatatatcattactttcagtgatttttcaggtttatctaaagtttatttaaccttaattaatttaaattcctctttttaaaaagtgaaatcatttacgttactatgttctcaagtttctgactattgtgttagacccgaagcctggtaatgtcttagaaaaagtggagtgagacaagctggtgtgcagtctaaaggagtggtgcctgctggaactatggggggaaagagagaattgtaaagcattggtttttgaaccaagtgattaagccaatcattggcttgcatatgtataatataaaatgttacaagagttcaggtcccagttcccatatgaaaacccacgtggcctcatgagcctgtggttccagttcagggaggaaacaggaggaggattgctgaggcttgctggctactagcctagccaaacgatggggaatttagttcattgagaggccctgtctcaagagaataaaggcagagactaatagagaaagacactcaatgtctgcttctggccccagcacatacaaacacaggtctatgcatctcccaacatgcatgctacacacacaataagtaaaataacaaacagaaagtagttacaatagtaattacttgacactgtatgccaggggggatgcttagcactttctctgtacactaatttttcccaacccctcactgacataattcctagtattattcccaccttacacagagctgaaagggctgtgggaagacacatcattgaagtaggtacttgttctttcttggttaaatgaatgcatgcttttaaaatagttttgacattctattaattagtaaataattgataaatcatttcatatattttatagactgtgtttgtcatataaacatgttaagaatacaccaaagatattgagaagaaaggaaaggaaaacaaatttactgagagacaccagaggcgggtagtgctcactgacagttgtgtacattcacactttaatcttataagcacttttaagtctacttttcaatcaaaatcatgaacttactgttttgtgtgcattatgtgtgcttgtgtttccttgtgtgtgtgcattgtatgtttgtgtttccgtgtgtgtgtgtgcttgtatttccctgtgtgtgtacactgtgcatgtttgtgtttacatgtgtgtgtgcattgtgtgtgtgtttgtttccttgtttttgtgcattgggtatgtctatgtttcattgtgtgtgtctgtgtttccttgtgtgtgtgcattgtatatgtctgtgttccttgtgtgtgtgcactgtatgtgtttgtgtgtgtgtgtgtgtgtgtgtgtgtgtgtgtgtgtgtgtgtgtgtgtgtgtgtgtgtgtgtgtgtgtggtgtttcaacagatatgaactagtctatgcattcgggagatgctgaggcccattgcttgataagagaaaccatttcttgctggagagcactgattttaaaagtaatcaacattgacttttctgtcactattcaagtaagcatatatttgaaactaccacaattaaaagaccttgaaggttataaaataccttccttgggctcacttcttctaggatactgcccgacaaagtgcactaaagggtgaaggccattgttatcctgctcatggcctttgagcagagttgagctgcctctactgtgagattctagagacactgagaaagtctctcatcttaaaatatcttaggtcttaatgttgtgggccttgggaactgtgtctccttgttttccattaacaaataaagcctgtaagagtggtaaccacttaggtttttatcacactcctaagtggtcaagatgggaggtactgaacacatgttttcaggcccctctctatgatttcagttgcacaggccaaggaaggagacctggtacatttaataagctcattccggaatctgctataagtggcttcctggatcacacttggaaaaactttgaagtaccaggttttttcttttaggccaccaaacagctcccaaattatgacatggagatgggggtttgttattagttatcaatgctaggcctagctctcactagctcttataacctaacctgtttctcttcatctatattttacctgagggcattttaccttccttccttctgtatatcttactttcactacttcttgtgtctggcttatggctgcctggcttctggcccaaggcctgtccctccctctctccctagttctcttctcacttctccaccctaaatttctcctcctaattattctctgtacccaccaggccggcctatcactcttctgcctagctattggctgttcaactttttattagaccaatcaggtgccttaggcaggcaaggtgaaccagcagcaggtcttttcataagtaaacaaatgcagcataaacaatcgtaacacattcttgcattgttaaacaaaggcagcagaaacaaatgaaccacacctttactgagttaaaatactatttcacatcataaacaaatataacatatcattacatagttaaatattcaacaacactttgacttatggataattcacactttgtgatacacagagtagtgtgacagacaaaagtacaaggagcaagtggtaaattacttgttcaaaattccctgcccctgagctgctgtctggtgcagctctgcctgggttttctgttttgtcacctatggcctcaagtatttccaggtgaaatagaaacaagagctccaccccaacctctcagcaaaaacttatttcccaacctttctttctttctttctttctttctttctttctttctttctttctttccttggccttttcattttgctttattcagccttaatttttctgtagttttattaagatacatcccatttactcagaacatattgtatgatgtatttgacatacaatgaaatcatcattgtaataaagacaatagccacacccataaaaagtctatgtgttgtggcctcccaagagaagtatatactgggtagtatttcctcaggttgacaatttgggatgatatttccttttaggcacagccgaagaaatgttcacttggctaccatcctttctaactttttaggtggggcctctcacaagtgattaaaaagtgaggtccaataccttcaggatcagcctctcaagctggagtctaagacctaagaccagtcttgggctgtggcatcatgtcatgtggtacaaggaagtgagcatggatttgaggcttggaaactggatttccctaatctcctttatagtgtggtggtgatagtctttctgagtcactttgcttgacttctgagtccaaacttttcttgcttaatagtccaagaagtcagtcttgaatccatagagcataatgtacataacgtccctgaattatatttcattctcgggtgccagactcattgggtttgtatcacacaacgctgaaataataaaaaacaggtgccctgccaagtggctttgtaattggggtactaagagtgtagttttcaaagaagaaaggcagactgaccccagcgatgggtctatcgtcctactagtactgaataagccgcagattggcaggggaatgtagtgcctcaccacataaaggatgaaaaatcagacaagaatacttctgtgagttagggaaagtaaacttgattttataattactgcagtgaaaactgtggccagagcctgagccgtgctcctgtggtggaactctgtttggaagttagaccaacatttcgagagtgtcagtacagagaaaacaggaaggcagcttcctttctgaacatacaccatttcctggagaggaaatgagggcttaaaaaacgtccttcgttggctctggaacagagaagtgtcttagagatggctgtatatgtttactcacgcaggacaccgacctttagtaaaagtccttgaaagtgccttcttcttgtgatggtgccttgtgatgttcacattgtgttctgatggatcattgatctgctcacagccacatacatgctcacttggacagtgtctaacagcaccctgcaaagtggctccaagccctgctcttcctttaaggacactggtgtccccaaggcatgagcagcaggcagagcagcaaggcatgggcatcccctgcatgctacaacacaacttcgccctcccaacagtcctgtgagcaggcagtgcagacaaatgggggagagtatttactgatttaaagattcaaaagctgactttatttaatggtatagccatagcattacagtgaccacagtctatcaaccaattggcaggattatgagcaaaacccacaaaccaccagaaccaaagactgagactgacagtactggaatgtgtgtgtgtgtgtgtgtgtgtgtgtgtgtgtgtgtgtgttgtatggtgtatgtgtgtggttttgtgtgtggtgagggggtatatggggtgtgtgggatgtgtgtgtggtatatgtggtatgtgtatgtatgtctgtgtgtgtggtgtgcatggtgttctgggtgtatgtggtatggtgtatggtatactgtgtggtgtggtatatgcagtatgcgtgtgtggtatatgtgtactgtaatgtgtgtgtatgtgtgtacagtgtggggtgtgtgtgtgtgtgtgtggtgtgtgtgtgtgtgtgtgtgtgtgtgtgtgtgtgtgtgcaatgtgatgtatgtgtatgagatgcactgtgtatgtattgtgtggatggtgttatatggtgtgtgtgtgagagtggtgtgtgcatgtatggtgtaaagtgtgtgtatgtggtatatgtggtgtgtgtgtgtgtgtgtgtgtgtgtgtgtgtgtgtgtgtgtgtgtgcatatgtggtatgtgtatgtgggtgcacatatgtgtatgatgtatagtgtgtgcatgcagtgtgtggtgtgaggtatgtgtgtgtttgtgtgcaatgtgatgtgtgtggtatgtgtgtattatattatgtatgtgtgatgtgtgtacatgcatgtgtgtggtgtatgtggtgtgtgtgtctgggtgtgtgtgtgtacggtatatggtgtgtgtggcaaatgcttattagtgtgtttatgtgcacatgtgcatataatgtacacatgtgtgtgagcatgtggctatgtagaggccagaggtcaattttggtgtctttcctgtatctccacacacaattttccagtctctcactgaccttgaagcacatgaatttgactaaactgactggtttgtgagcttcaagggcccaaagaactgactggagggcatcttctgccccacttggacttttatatggatgctgaggatccaaatttaggtgctcaggcttgctggagtgccacctgactggatgagccatctcagtagcacactacctgacttttaagtggtagtttgaacatcatattgagttatcagacctgtaaagctttacagggtttaaaagataggcttgaaaataatagaaatggcattttcatggctcagtgttgcctaatggaaagagaacacaacagaaagctctgctcagagtgtgcactccaaaggcaccccagatacaagggagatctccagctggtacagcctcaagaaatcaccgccttccatagtgggcagggtgaaacacctcatgaaaacgaaggggtcctcgtgacctcggcctcttccctcagtcgccttggaagaccactatggctcaaatttagtgtgttccaggaggctggtgacaccttcccctcccttctcaggatctttctgacacttcatgctctatatcatttctttctttctttcatttaaaaaatgagtatttttatgccgggtggtggtggcacatgcctttaatactaacacatgggaggcagaggcaggcagatctttgtgagttcatggccagcctggtataccaagtgagttccagaacaggctccaaagtaatacagagaaaccctgtctcaaaaacaggcaaacaaacaaaaaaaaatgagtacttttaaaaatattcatttaaaaccatgtggttcctaatgtatccccctccctcagaattttctctaagtgtctcataagtaatattctgagtttgcagagttgcccccaagtccacactcaagctgtctcatagtctcttaccttttttgcatcggtgtgtggatttgcaggcaagaaagaatgaatgtacctatgccttcagacttcatggccagagagtgcagggtgaagctactttcctgctgcccttctggccccttcagtctcccacagaaataactttccagcaaaactatttgcttttctcttgtttggtttaaaatctgccattacaattccccttttctcttcctctaaagaagcccccatttaatactgtgtgtgtaaagcgaacaggtgttctatgttcacagaccgttttgaaaagattaaggaagtttgtatataaaggccttttttaaagctaaatctgctgaacagggaaaatcacttccatcaaaaccagaaatcaagatagcatttacaaccagaaggttcatgcttaagctggtgtaatcaaatgcttcaatttctttttgaatgtgtagattttcctgaaagtccacagggggctatttgtggggttttcatgggcaacttgcacattgtaatcaaaagtctgaaggagcaagtacctcttctctacctcttctctcccaagcgtcaacaccttgacatcagctctctgtgctctaagccagaactgggggctgggaggcctttgcgtaggagtaacgatggaggtggcaatgggaggaaaacacattttgacctttgagaggaaagcagagggctctggcggtgcaggttctgatcatcagcttctaatggagagccgcaaaagctgtgtgtgccaccagttgtaagtcttcagcccatgagcccatatccacgccccaactagagcctaagcagcaggtgtcactccatcacacttgttcttgagtctgaaagggtccctttcccagcctggtgcatgggaacatggtattcatcagctaaaattggatggattcaattaaactcagcctgagtgtgtgaaggcttcatcttctttccatctccccgagtacactgcatcaagtttactgtctcacacactgatgggaagcagagtgcccaaacctgtgaggagtctgaagtgagccagctgtcattttgagacaagggcatggagttccttcatagacttggattccataaaatcaattgaagaccctgcatgagagttctctggatggttctagcaaaacagtagatggcaccaggtaggtcactaagtgatcttcaaagaaaaaacagatcagaacatttagttgtgtggcgaccagatggctttgcattctaccatattgatattgtcctgtaaaattcacacattatagggggaagaatcacagcagaaaaataagacagcaaagagaaacatgtgtcaccgaaatttcttactaaggagcatgggccagcatctaaggagagctcctgtggtggcagaattgtactgatgctgttctagggatgttctctaattgaagtgagaagaatgaaaggttaaaagatgagatgctggagctggagagatgggtcagggactaagaggacttgttttttcagagaaacccaattcagttcctggcactcagatcaggtatcaaaactccatctccatgggattcaatgccctcttctggcctccatgagcatgtatgtatgtgcgcgcgcgcgcgcgcacacacacacacacacacacacacacacacacacacgcacgcacgcacgcacgcacgaacgcacgcacgcacgcacacacacacacacacacacacaaataaatttaagtacagctgcaattattctagaacatgaaaggtctctgagatgtaccctggccagagccagcagacttgggtttcctggatctctctctctctctctctctctctctctctctctctctctctggtgacgctagcaacttctggtggtctctctctgagctcatttgagagtccctcacgaagccacttctgatatgaattgtgatttagaaagaaatgtgcaaagcatgtgaagttttgccaaacctcttaatgcatatgctttcatctacataaatccagcaataaaatccccaggcccaaatccagcggccttttcatggatggtgaccataacagcgatgtcttaataatgtgccttttggaaggatcctcctcactcctcttattatgggtgtacattcttataagtctgatgcaggcggtgcctaaagcactgtctcccttactctgttagcatttgtgtctctagacaattttggttgggaaacaccttgatctggttctcctttgcagtccctagctagacccaggctgtcccgcttggtacttgggacatattgaaccaccattggtgtggtggggtgacgacacatgtgtctcttcccttccatttgtcctttcaaatgtacttccacccttgtgcactttctcgccttctgtttgtagcaccctttggagcagcctgctgtaatagtgccatcttgtcctcatttcagtgtctcacctcccacttctatcacagccctgcaagcctgaaggtggtgactgtctctggtgttcgccccaaatccaaagatccccctacacctggatagtaagcaagttcttaactcctccataaattacacaaatttgagtatggcatctattcctgccaaaatacttatgcctacagcagacgaatgggaaatgatttccatttaaaatgtattttgtactcatactataagcaataaccatgctgaattttttggtaaacaattcaacaaacccagccctatgtgggctaaccttgtgagttcatctccaagtaccatgttacatattcaccaagtggccctaccacatgtgcatttgtgaactggtggttatatctgtttctttcttttttttgtttttggccctttgtatttagcatgatgacatgctgaccaccttcctacagcgggtgtgcattctgcctcttcctcctttctcttactgtggtgcttgtagtagtttgctggccgattgaaatctaagataatagaatctaggtattgatgaatcatgaatgcagcctaagcacagaactgtctaatgatgaacatcttgcacatttgaggtctgatctgataggaagtgttacattcttctccagagccagcaggaagtaagataactgttccaccggtccagtcatggtgaaactgtttaaagaaccattaaaatgtcaatcctttagggactgtcaaacattaactcaggtttttgtcataaatatgtaagcaccatgaacatacatattcacacacacactcacacacacaaactcattcaatgaagacctgatgaactgaacactccggggtctgttatgttgctgtcctgtgtttaaagatcacgactcccacaccgccttttgtaagtgatgagaaaggcaatgcaggctcatgctttcgtgaatatatactggatttctattgggttcagagttttctgttgggtagcaattggagagtgcacattctacaggaaagatctcaacctctggacactcgctcaaaggcagcctgccttcgcccgcccagtcctggtcttcacactcttagaagaactctactgatgaaatcagtgctttgctaagaaagtgtcaactacattgtgcctctccggactcacatgctgatattaaaatgaaaaacaaacttcttccataattttttgtaatacagccccagttgcacaagacagagtcttccactacccctctttcctagtgttatgactacattagacaattttccagattcttttgttagctttctgtttcttcacttgagcaatacaaaattttatattcaaaggtatttgatttatccacaaatacttttaactgtttcactacaaatacatttgtgaattggaccattcttgcagagtaacccctatttgaaatatattgaatgaaattacaagtattgagtatttgtttcttaatctaaaaagatttctatacctcgagcttataacatggaaagatgttgtcatagccagaagacacatccctgtaggacactgaatcttctcctcttgcctctctcctcttcctgcttttattcctggacacacatatacctatttatcattataagaaacaagtttagatagcatgaatgcttcatagattccatcaagtaggatcaaatgtctgtgacaagaagctagatgcagcaaccaaacaacttctttaaataattaattcatgaaaatccattccatttcacttcagaattcatgtgataaatgaggtatttaccttattttctgttgaaaaaatagaatagaaaagaagcatcagtcttttgggaggatggtgtatgcatgtgatgtgcatggagcctggaggttggtgttgtgtggcttcctcaattactctttacttttgtttagtttgtttttctgagacagtctctcactgagcctgaagctcaccaattcatctgtgatgaccggcccttggtctcaagctgaattacagttgtgtgggaccacacgacggttaggaatctgaactcaggtccccatgctttttcagcaacaacttactatctgaaacattttttccaacccctaatctttttaaaaaataaaaaaataaatgttcacgtaaccatatgtaattttgtgttcaaattttaaaacaaaataaactcagaagtaaaattaagtatctcagctgtttctgccatatataattgaagacaaacaccccctatccccatgatcacttctttagccttgccatgtgagagaggaaccattgccctctgacagtttgcttcactgtgttttctcttctggaaaatagtgttttccagccagatccatgaagctgttttggtatttctctttcctctccctcccttcatgtatcctacacatgtgcagaagataacttgtgagaacaaagtccagaactgcctcacatgtcacaggaagagatggcagagtggggacagctattagctgaggaaaacaattaagttgcagggtggctgtcctgaggatcactaacttaggacatctttctctaatgagattttcagacctggcatttgctaaatgtgggagcttttgtacttgttttgcacttacccacaggataagtcccaagagagattccatccattcctcatggagaagcagatgacaaagaatgaactctcagtaatcactagttaggggattgtgctcacagtgagatcttactccagaaatgagtctcagaagaaacttaactatttttttccagggggatatgcagactcagctgtggatccccttggccacaacaaagttacacttatctagatcattaaatatgctaatgagtgtatgagaaagacttattgctgacagtcatcaaaaacgtcatgtttacatatccattgtaactaatatttcatctgctggaattaatgttctttctgccttgcagaccataataactaactctctcaggatcaagtgcactgttcatactttccttttgccccagctgactcctagccctccaccctttccctttattctccaaaggtagcttttggtgatgtttgctatatattaatcagtgagtccctttgctatagaactaggtgagttttattgaataaaatgtttggtcttcattttggcattaatccaaattgctgaacacagagggtcttttatcttcatccttttattcgtcttatacagaaagtgtggttttggcatcctgcctgttaatgtgctgctgttttctcctgatgtatgtttgtgtgagtcaacagaaacctgttggactgaacagagtggattagtaagactgtatgcattggggtagccagatatggaatctggggtggggaaaaccagaataagaggggacaatgggctctcagacatcaggactgacaagttcctgcaacgacagtcaccacagattgatttcccttcacatttcctcagaacaaagtgacaccatgaacagcaagtactctgctttgtcacccttgttcataggtacacagcccaaagaatctgctgcctgtgcctcaagaaaggggcaagctctttgaggagtggggccccagctcaaggcttcgaagctcactcatttcttaaactgaatctttctgtgaagattttaaacaaagccttccagagtagctcagggggaaaggctaaaaagtacctctgtagtgtgtgtgtgtgtgtgtgtgtgtgtgtgtgtgtgtgtgtgcgcgtgcgtgcgtgcgtgcgtgcgtgcgtgcgtgcgtgcgtgcgtgcgtgcgtgcgtgcgtgcgtgcgtgcgtgcgtgcgtgcgtgcgtgcgtgcgtgcgtgcgtgcgtgcgtgcgtgcgtgcgtgcgtgcgtgcgtgcgtgcgtgcgtgcgtgcgtgcgtgcgtgcgtgcgtgcgtgcgtgcgtgcgtgcgtgcgtgcgtgcgtgcgtgcgtgcgtgcgtgcgtgcgtgcgtgcgtgcgtgcgtgcgtgcgtgcgtgcgtgcgtgcgtgcgtgcgtgcgtgcgtgcgtgcgtgcgtgcgtgcgtgcgtgcgtgcgtgcgtgcgtgcgtgcgtgcgtgcgtgcgtgcgtgcgtgcgtgcgtgcgtgcgtgcgtgcgtgcgtgcgtgcgtgcgtgcgtgcgtgcgtgcgtgcgtgcgtgcgtgcgtgcgtgcgtgcgtgcgtgcgtgcgtgcgtgcgtgcgtgcgtgcgtgcgtgcgtgcgtgcgtgcgtgcgtgcgtgcgtgcgtgcgtgcgtgcgtgcgtgcgtgcgtgcgtgcgtgcgtgcgtgcgtgcgtgcgtgcgtgtgtgtgtgtgtgtgtgtgtgtaagtatgtcagtcagaattatgtctgacaataggaactgagaagcagaagtagggtaaatgacaaatgctgatttttctcttacacaaaaagtaccaagttcaagaagagggaggcaatgccacactgtcagggacccatgttcgttcctccttgtggttgtgtggcttctgtgatgtgggacaagatagaactggagacttggccagggagatgtgggaatcaggaccctaagcaggggctatgcccccctcccttggacctttccagaagttatgcagagtgcttcctcattgagggagatgatagtaaaagtagctttattttgggtaaatttgtcagggttagtataactagtggataatgtctatcttcgggacttctgccagtgtccttcccactttcaagataagcttctgttctctacgccggaagtggcatcatgcatctcctcagtctgtccacagtacacttaggacacaggcttcaattcaggaactttgtaaaaaatagatgagagtctgaaaatccagggggaattacaagatgtggtgaagactgtggtccccacactgatgaaaatgactgaggggtaagagcatcaatgccatttctctggaaatgtccaccttccctaaaacatgtgacagatttgaagaatgcttccggatgcctcaagccggtggaaaatggcttcgccgttcacatcctcagatgaattcctaggcccagtgagaatctctaaggagaggaaactgccctcaaagcagggctatagggccagttggcagttgtgtaacaagtctttctgattctggttttgccatttcttcagtccttcctccctgatgccaccggtgaacttttaaaatgcagactagctctgcaaatttctaggacaaatccttcaacaaaggaacagcattgcctcctgacctgggatgtgctcactccagctccagatcaaaatcccacctcctcaagtgtgtcaagttccttgtggagctctctagaacatcctctcccttatccactattacacagcacctgtccttgtgtcctgtctgaggtcattggtcctaccccctcacgaggcagatccctgtggcttctgaggaagcagatccctgcttcctcacagcagttgctgcgactgcttacttgttggtcttcccatgtaactagacaataagctcctgcaggcaggagctggcacactcccaggacaaagttcttaactgatgatagaatatgttgatattttaaatgatgctcaaatatcagctaatagaggtgagggagagacagtgcaagggaaaggaaatgactgaaaaaaatctgtgtccgtccatcccttcatgttctttatgcaatgtcaggactcaggcctgtcaaggacttgcttccctcctcgactgagattgcaccaaagcccccaaagtaccaaagcccccaaggagccaagcgagtgatggagtagagttgaaatactagctatgttaatggaggccaggattgctcagactgaatttatagctacataaattgacccagatttactttctattattcaaaattagttatgtcaaagcaagaggcttcttggtatatacattactgctaatgtgtccctggacataaattttgtttgggtttttattatctgttcttgagaattgaaagtgaatttcagacagagggaagcctttgcttctttgccacagagggagcagaatttgcctgagtgcagctcatggcctctgggatgtacatggtggtggctagccacccctttcagtctcggctctcacccaccttccatcctctcatccacccttctcagcctttacttggtatccacagactatcaggaagctggtaaccaaagaaacatcactgcattgacctagctgtatgggggcctatgtttatgcaaccccaaagagtggccatcttgaaaatgcccttttaaactggcatcattttctgcaattgatttgaaatgattaactttgctagaatgaaaatcacccaagcaaacaataaccaagtatttattttcctaagtgcacaagaaatacacaaacaataatctccacttttgtctcaaaaaatgacaagcatttgtatgttcaagtatgacctttccttttgctgagtccttcggaatcgtacagggcagatggttctgtgctatgcataggtcctgtatgtttactcggcgtgtcttctgcctacttttatctgcctcttagcaaaccacaccttgctctttttttctgatttctgcctggaagtctggaaggaatgactagcagtgttttcttgaggaagcagaccctggaagtccatgagggagggcggtggggggtgaggcagtggggccacaggactgctctgacagctcagcctgtggaggtgagctccatgtaccccagcaagaggcggcagaagagctggctggctgtagttagggttggatgtctacactactggaaacttgtagcttttctaatctcacatgcctgcactgcagcatgcaggaagaaataaacgattcctccagatctgaatatttgaatctgctttcatatgtgccacagagttgtggtgactagaaatttttaatctttttctgagtgagtgtgaactggacctgcccatttgtcagtatggctctcattgtcaggggaaaggggagatggacagcagaagggtgagctgtacctggaaagaccgacagtgcttacttcctgagaataagggtcgaaaaggagccaagcaccccggtctttaacagcatgactttccctggggaattttacatttagttcttgtgcctttggctaacacacaaagggcacacttagcctctgtgaacaaaagaaagcaacatttcaaactgtgatttgggggaacttttgcttctagatttttatctcatccagctctggatgtcaaggaaagagcatagatgacttcagtcaggccagatcccctctccttgctgtgtaccaccgtgcctgaagatagcttgtgacatgctatcatggagttaaacataaaagctgctgttggggtcaaagcaggaaagagccagattataggctgagccccttacctcttcctccccagtccttaaactcactttcactttgactacccagatacatacttcaaggaagtagagagtttattgttgctgttggtggtagtgatggtgtgtgtgtgtgtgtgtgtgtgtgtgtgtgtggattgtgtggtggtgctcctgcatatgggtgccatggatgcaacgttcctccttcggtctctctctgccttatgttttgaagcagggtttctcttgaatgtgagcttgcctacttgactatactggcaagccccaagcctcgggggcaggggtgtcccctgtcttctgaaatctggaattacaagcaagagtcaatgtgcccagccttttaaaagcacagttctgggtacaaagcctgggttcttgtgcttggattaaaccaagccattaataaaacagcacagctggcctacttaaatgcccatgcaatgccatcccagtgcacagttcagcatctgcaaagatttattgtatttagcacctgtctgccagtgcagactcctgactgctgtcatttctcctgctgttattttgttgtttatttttaagccaattctatatcatttgtcatcttgatggaagagcctatgtttgttgctgggcttcatgtaaacaaataagaataaggtaaaaaaaaaaacaaaaagaaaaaaaaacaggatacagaattcaaaaagcctaaatacatcccactctggtttctcacccctctgggctgttgacagagttagaaaggagcaaagaggggagagtggaggagaggtcccaatcagtaaagtgcttgctaagcaagcatgagggcctgactttggatcccctgtacccttgtgaaagccagacacagcatgtatgaacaccagacttaggagacagttggagccggaggattcctggaactcagccagtccagtgcagctgaattggtgagctctggggaaagtgagagaccctatctcaagaaataaggtaaagaaaaattggggatgatttttgatgtcttcttgtctgtacatgcattcacacacagctgcccccacacacaaacatacacagagtctgtcagctgttttgttctgttgcctagagtgaagtacacacagacattgaaaatgggaagaagagctagtttaagtaaatgtttaagtcaaatctgtgtactccatctcctaaacagtaagataaaaaatacagcaaaaaataacgaatttcccttttgctgcaaggaaggctgtcaatttgggatgggtaaatatattgccgttttgcatatggttatgaaaaatactgttttcttttttttctgtagctgaaggtgttatataaataggatagcccacaaagcgatctatcagcatgcttttaacatggttctctgccaagtgggtactgcagcatggccagatttgacagtgtctttctagctgggaaagcacaatgccctacaaactccattctccccagatcgttttaatccatgggagatgggaagagacagagagtgaatgaaacggttccagaaacactcacctgagtattaatgggcacactagatgcgattcctggagttcacattcttgtaaattagtctaaggcacatgctccaccagaattttgattttaaaataactcaatttggatgcatacaaaggcagggtcagatggcctgtgtgaaggcagccagcagtcttcgtgacttatagtcatcaggcaatgtccagttgccattgatgagtgctggcacacatcccaaaaaaaggccatcccagtgtggatgacccacctgcccttcatacagtgcctttctctcttccaggtgacttgcaggctaagtgtagctagaatggtcttccaacagaaaagccttcctgatcttttgaaagcagtgttctctgaacagctcagccatgccagcaagactctgggtggaaggccagggatatgattataaagtcacagcttgttccatccactgtcctccactcctcttgcaccatgcaaccttatgactgggaacatcgtagagatctttgtactttcagtgaatccgtggccttgtggcattaactcctgatctaaggcgttttatcttatactacaacaactctggttcccccctcatgtccatgccctccaaacccttctgaagaaggcagacaaatccaaacagtaagttacctgtgcactcggacaagaacatagtagatgggggctaagcacataaacaaagcctcaaataacatcagttgttttggtagctacatgattggctgggcttgatattaatgttgagtatgccattgtctcagaacaggccttcacaacaatattgattagttgagtccacttgtttacagtggatatgtgatgtctaagtatggggacttacttaacaagtacaacccatcattttatgactggctcggagttccagcttgatgagatcattttaattttgactcagtttctccaaacattttcactgatcttagttccatatcaaagatgaatttattaagcttgcttttacatattttttacaaagtcattggtgtaaattattttgcctgttgatggttctggatatggatgtgtaactcatggcaaatccatctacacaagtggccagatcatgacacaatagtcaggcagatctgggttctaaagttcacagcgatggtctagccttggacaagttcattaaactttcttaggaacagactcctatttaggggctgttgagtaactttgtgaggtaatatctgtgatgtgtggatccagatgtatgcctggtacaagcttgtctttcttccctctccatccccctgcctccatcacatgcaatatcaatgccttgtaggtcaggctttgattcatcactgaatgaatgatagtcaacagtgaatgttccattaaaatagcttcctctgaggactgaggagatgagccatctagtaaagtgcttgccacacctgcagtcccagccctgggtgactgagacaaaggatccctgagacttgctgcccaaccaagctagctaaatatgagagatacagatgcaggaaagagcttctaattcaaatataacaacaacaacaacaacaataataatatgaagaatgatagaggaaggcacacaacgccaacctctgccctttgtgtgcatccattggtagatgcactcactcactcacacacacacacacacacacacacacacacacacacacacacacacacacgcgccctcatccatacacactcactcatacacacacatactccctcatacacaaacacactccctcatacatacacactcactcatactcacacacacactcccatacacacacacacactccctcatacatacacacacactcatacacacacactcactcacacacacacactcatacacacacatgcacactcccccatacacacacactcactcatacacacacaccctcatccatacacactcatacacacactccctcatacacactcatacacacacactcactcacacacacacactcatacacacacatgcacactcccccatacacacacactcactcatacacacacaccctcatccatacacactcatacacacactccctcatacacactcatacacacacactcactcacacacacacactcatacacacacatgcacactcccccatacacacacactcactcatacacacacaccctcatccatacacactcatacacacactccctcatacacactcatacacacacactcactcacacacacacactcatacacacacatgcacactcccccatacacacacactcactcatacacactcatacacacacactcactcacacatacatattcacacacacactcacacacacaaactcatacacattcatacacataccctcatacatacacactcactcacacacacacacacacacacacacacacacacacacacatgcacactccctcatacacacacactcactcacacatacatattcacacacacactcacacacacaaactcatacacattcatacacacaccctcatacacacccactcactcacacacacatacacacatgaaaaatgcatttatgttttcttatttccttttaacaaatttctaatgggagatcatttcctgaagagaagagttggcaaaaataaggcttttgtttcttaaaccctcttgtaccttgcagctttagcctttgtcatgtgtaacccagctttcggaccctcagtagaagattccttttcatcatctttcatatctttaaactataaccctgaaaacaaaaggagccagctgaataaggatatgaagaccctgattctggttctttcactttgtctcccctgtggtgggctcttttctgaatgaagaatttggttcccacagatgtgagtcacccaaaacaacagaagcagagtagccaaagaggatggcaaggacacagaagtcatagagctgacatgctgtgtctgtaggacacctgtgaggagacatgacaggaattagtgcatctatggaaggaaaggggccttactgtctcatgctcacagttgagtcccagtttcaaagctgtagatttcaattatctgaaattattcacagggagaaagtgccacttttctctcttgtttacccacaacaatgtttaagctcagttatgattccaatggagaatttaaaacatccattttaagtgagcttttaaaagtctgctttctctcaggagtgactcatctgtaggtgaccaattacaagccaaaatggctgctcattctgctttaaaaataaaacatctaactcaataagaagactggattagaccctttaatcggataatggaaatccattttatatgcattaccaatctctcatcaaaccgtaccacagggcagcaaggggacattgcctctgtgttaaaccagatatgtcgggagaataatggtgtctgggctctcatttccatgagtggaaccagatgtggaaaacatccagtgcctagctctgaaccggaatcttctctgctaataggatgtgactgaattccaagaatgtttgtacagttaaaatagtagtaattgtttctcatcaggggctctctgggtgtttgaaaccctctccttgttggttttgtgggttttttaatgttaaacccaggcacaccgtctccgtgctgccctgaccagccctttcagagggctgcctcataaccttttcccgttacacttcctcttaagacatttcacgtgtgcttttcctttctacccacgctctgtgcttgccaccaaatttccatagccggtcccctcctactcatgacttcactcgctcctacactccttcagtcttagtgcagttcactcacattgtcactacaagttagataagaaaaaaaagttgacttccttaaaaggggcacaaggctcatgtaaaagatttcatatttttgagaatgttttcttctgtgaaggctcttcaaccctgtacactgcacttgccaaaataagagcaacccccacccaacctctgctggtgggacactcccccctcccatgccaccaggccatttgtgcctgttgactggttttcccatcagaagttcttaattatgagtcaataaaatagcactctaaagtcacacccccagggaaaggaaagattgcctaagcatctaggccactgggagaaggatggaagcaggccaagatttgttgtcttcctatttgttcatcaggcaaaatcagattttaaaatatgcatgaaaagctttcagaaactgctaaaatcagacttttattggtgttagaagagaaaactaaggttttaaacatgtgcttgcttctgaacacacacttggcattttctcttgaatcttttccggaacctgagtgttctcagagaggcgagggctcagttctctcacttttcagtaaagattaaaaagcaggtgctgtagtgagaactccagttgctaagatcatgtttccaaactagaaacatcagagaaacaactccacttaaacagaggcagggagagctttgtcacatgaatgttagactgagtgacagtcaagttcagctaacaaaccatgctgcagtcaaggcaagcttcaccccacggcctgtgggaaccatctcagtacccagaagggcagtggcaggagccattcctacacaagatactactagtttaaaattcttaggcctgtgagatgactcagtgggaaaaggagcttgctaccaagtccaatgacatgagttcaatcccaggattcacataataggagagaactgcctccctcaagctatcctttgacctccacatgtgcatcaagacatgtgtgtacctacaaacacacacacacacacacacacacacacataaagagaaggacagagacaaagatatgtaattaacaatcttaggaactttgggaattaaagtaagtacttcccagacaacttggaatttgattctcagtgatttcttaaaatagatatatatatctcctgttcttttgtttattccctcattcacttaaaatacaaatatttttgaaacatctatggcacatcaagtcaatactaaattggtatgcccaatggtccattcaagagtcagagaaacataccaacctggattctataattgactgatagaaactgaaacaacagtagcttttattaaccaacaattagatgtcacacttgacatattatctcgtgctatcatactaacgtagccaggaaaagaaggcaagcagcaggtgtgcagattcgtagagacgttggaagatgcttgaggtcccttttcactacagaaactaaaatcacacactacacatgtgtgcagaaaggcctctggctgtatttttaccattgtttgagaaagttttgaattcaagacatctagtttctttgagtctgccagcatttgtcttatggcattgggcttgtgatgtttgtgcctacagtgttctgtgacctgtggtagtcaaactctggagccaggcactatgagttcaaattgccactctgacagccaacaactgtgtggccttacgtaagtggctccaggctctctgcatccactcctcagctatcagataaggttcttacacagtagattcatgggaggacactggtgacctacatagcgtggcagctagcatccgcaaaacagccctcactccatcagctcctttctctgtttccacctacttctctaatccagttttgtgtatgtcttctttccagggaccccaaagggggccctcgttcgccagcaatttggcaggcaatttgtaaaagctaatatataatttatttaggagaaaaacctaattatgctgtattattgtttaattttctctggggcacacatctattgccacttactaaagtaagaaaagtaaactttgtcatctctcagagaggaggagtttgagttccacacatatggacttctcagactatgctgcacgcttgtcttgtaggccttgtcagaatgcagattctgttcatgtaggtctggggaggggccaaggttctccgcctcagaaatgatttcagtgtgctgtgatgcctgtgctggcctatctgggcacagtgcaatgagactgtacatagtgcacttaaactccatctgggtgagagtgcacgatcaaacatgtggaagctattaagacagagaaaaacatcaaactcaggacaagaagagtgggccaatgggcacagaaagcagagaagcatctctaggtcttaaaggccaagagcagcttgcatatgcccattcaagatggaggactatggagtagtactagcatgcaaatcatctgaaagccctgtttaatccagcttcttattcaggggatttgggggtaacttgcctcccgacacttctcaaaaactcccaggtggcaccagggctgcgcatctgcaactcatatgttgatttctacctcagaccagtatcagagactggagggaaacactgcatcgctggcttggacatgctgcctgccagacttttccatggaagactagggctcaggctccacaaagaacgagcccttctctgcaagcacctgtgtaaacagattggaaacaagctgcacatagagaagcctacagtgtgacacctggccagggcacagtcgcttgcctgtgtgacaacaccctcgttttaactcttcgctgtcccctggccccactatttccaagtcccattgtttctgacaattacatgcaaccacaagtccccaagacatgaagggtggcagtccttcctcaggctttgtacccactagaaagggcagtttgcctgagagaggcctgcttttgaggaccacctctcaccactcacatacctcacctcatggtcttcactaaatcagatacgaagaatcttcacatggtaaaagtcagggtgacaattggtccaataatttggagaacgacactcgatcaagattgtaagtctcaaatttcttctcttttttctttaaaagaatttttatttaatctctctctgtgtgtgtgtgtgtgtgtgtgtgtctgtgtgtctgtgtgtctgtgtgtctgtgtgtgtgtctgtgtttgtctgtgtctgtgtgtacatgatctgcaacaggggaaatgcattccatgtggcgttttttttctcccctcctgcctttctgggagttccaggattgagctcatatcatgaggctgacacagaatatgcatctgcccactgaaacgtatttctgctcttcataatttttcacaggacaattcctttttggttttttggttgcgggaagccataatcaccaatctttctcagatgctttggtgccaaagaaaatcctggaaaatttcatttttaggttttggattttttaaatcctagaattattgttggacaatatgggagttatgattcccctgtcccccttggaatttaacatactttcccactgtgtgtggatgcttccctaatgttgtttgtcagggtcttgctgagcctgtcatggtgacaatccatagtgctgtctggatggctcaagtacatggcccatgtctgctcatccatgcccacgtgcagactccctaagctgtgtatatatctgaagttgcttttctgtggctagttctaaagcaagcctatggatttagggccacagccgatgtctgggattaataccggacacccagcatgagtactggtgtgacaggtaacatagcagtgatgagacataagcaggaaaacactcctcaaaattccaagtaagaagggcaagctgaactctcctgtttgattttgatctaaccctaaaattaccataagacataaaaatccattcgtaagagtgcaaaggtcaatgccctgggaaacggaagcagatgttttaacacaaacatctttagaagactcaagatagccaaagcctccagtcttgtacttctgcagcataactaactggggtgagctttaaaatgtttgtctagtggaaggtccaaagactggaaacccattacttcttcatcaagagaaaccagttggggatagggactgggggcttgaatagcaacatgattcgtcattagagttggcccctaggtctgaatcccacatttactatctccctcaatctggccttagacaggctacttagtgactttgaccttgagcattgtctatcaagggatagtaatgacatttgcctaatggagttgtgacaggatgaagtgaaatgtacaggagaatactgactacagtgtgtgcttagaaagcattagctggagttcactaactcgcagcagcaatgctctgctttggagttgattgcacaggagggaagtgtgtcattgcaaaaggagatcggtttgtggggaaggaagcccaaggaacaaggaagcttccaggcccagagacacacgaatgacacacagtaggccttccacagacatctgttaaataaacaaggcttgaactaggaatttgtagaatttcatatagttggctgattttttctgatatttactgaccatcacacttaacaaaacatttttctgggtattaaataaacagacaggtagccaaggcagatctcagattctgttttgttgaaatgaaaaaggaggtacatagagaaacaagagaaacttaagaaaatgagtgtcattagaactcagtcagggtctggaaagacagctcagcacctaagaaaccttattgctctttcagaggccccaggttacagggatagcaagcacaaattactgtaactgtgaaatgatgtacttcaacacacatgactaaaaacaatgataacattcatttttgctttgagcccatagtctgagcaggctatgggtgtgagttggctctatttgactcctagcagagagcagaaatctggagctacagtcatttgaagacactttcggttgttggtgttgcctaggacttctaccgtagctgtcagctggaccatatgtcctttctgacgaagtcttggatgtcacataatatcctgtgcactctcttccattggtcagagacagcaaattctgtgagcctgaggagagaggagaacacagacttgagcccttggagcagagaagtgaccaagtcacactgtgagacgagcctatggcatggttattgctgtctggtcctttagaaaaatgcactatgtcactttcttgcagcaactttaatttttcttctgtcatagcttctcagtccatgctagatgttcaggtactttctgcattgctcatcttatcacttgctgggaattattccaaaagaggacttaaaaccttgttcctcaaagacataaggtcttagttttagactcaagtttggttattgtctaagacaactgtgaaatggctttgagactacattgggccaagaacatcagaaaaagcaaaggtgacttctaagggaccaaaaggcatggaaggaaagagaaatggaagaaagactatcacagaggagaaacaatgattgtgtgtgtgtgcgtgcttgagtgtgtgtgtagtatatgtatatgtttgtgtgggtgaatgcatgtgtgcatgtgcttgcatgtttatgtatgcagtatatgtctatgtgtgagtacttgcatgcttatgtatgcagtatatttctatgtgtgagtgtgtgcatgtgtttaaaagtttatgaatatgtatatgtatatgtttgtgtggatatgtgcatatgtacctatgtttgcatgtgaaaaccacagaccaactttaagcatcttccttgaatatctttcaccttaattttgacatagagtctctcctgaatctgaagttcatggacttagctagattggctggcaggtgaactgcagggatctgctgtctgtctcccagtgtctctgtctcctaggacctcggtcttctggtttcttggtctcccggtgcctctgtctcccagtgcttctgtctcctggttcctctgtctcccaatgctgggttacagacacacactgctgtgcccagcttatttgtaagtgctggaggtccaggcttgggtttggccaattatacagcaggcactttataaaccaaactttctccctcaacctagaattttctttttaatcattgttgggcagcccccaagaacgtgaaataaaatccaacctctggaggcatggaacctggtcatcgtagtagattctgtcctctgggtaggcttgtgtgggaaaagacagaaagactaggttagtaaagggatggggacagagttagaggaataaggaaaaacactgggaggcaaagcccatggcaagcaagcaaaaacaagaaggctgaggacctcttgagtgtttttcctctctgttacttgcccagactttcttctgtctcctctggcttctggaacatctattcatactcttctctttggacatgtgaactaattttctctttagatggaaggataacagttggtatgcctagttacaatgagccctggtgagccagactttttattttaaaggtaaggtcattgtcataacatgcagtgctctgttgctgggcagaaataaaacgttaggcaaaatagtattgatgtgacagacacacagacttaagtactcagggacaaaagcagacaatgccttacttggggtgccgtctaatcaaattcaggcatgtgtgcagcctacaaagatgatcattgcattggacgacaattattaaagtggggtctttgttcagaagagtgtcaaagttagaattccgtgcagcattatgggtgtcattttgtaagagatggtgttgcttagaaatccccctggtccccctgctcttcttcaaatctaatctgtttgagttcacaggaaaaccaggcaccacacacagccagggaagtgcggggacaattaacacctacctctaagaaccctggtggcgattaataagatgccatgctgcagcagggtgtggttttatgtttcccacaataagacctgattaaaattggctgttgaggctcctcagattcctggtggtgtgaggcatgtccagccattggctgctgaccttcatgtttcccctaccaattctgtagccatttgctgatactcatcagggattctggtgtttcccgggggaagcatagtaaatcaatccctgaaaactcactggaataaattttattttgcagatcaaatatatttatcccactgctgactctgccttctaaccaaagtcagggtggtttcacagaagtggcctttccctttgtcaggtcacttttgcttgattcttctccacaggcatgacagacacttcacagatgggaaaactgctcttatcgtgacagtgacctgggcatactaccgaatccagccatgtctctttaatcctcctctaactctgtctgggagagtggcacaggcccaccagtgtcttccattggttttctaagcacttgaaatgtttgccaataatttctgtaggttttgatgtcttagcctagccatgtcaacaaaaagagaataaaaagaaaaattcctataaaataaagcaattttagtagtgctatttatttttctttcatttggagcaatcacaatttcaggtctcatcagcatttaaattgcataccaaatgaggttcttatttaaacacaaagaagtagacacacacagagcaacaccacacataacaaaacacagagagagacacacgcatggacgcacagacacacatatagaaatacatatatgcacacatgcatatatgtgaaaccaaggtctcaggatatttgattcttccttcttaacttaaaaaaaaaaaaaaccacagggacagcaattatttccaagcaatgcttcctgtatcaaatggtccctgccccctcctcctacttttaaagaactgggctttgggttgctgataatttcaggataaatgtttcgatccaatacaaagacatttcaaaggtaacagaaacagactggaagccctgacagctcctttctgaaggagggcgtatttctagatctattttatgacctaggaagtctcaggcccaaattaaaatttacccccccccattgtcaggatttggggatttagtatagacacaccttgtagttttggcagtgacctgtcacttggatggttgtcttcaaatactcctaatgctatttcagacaaaaaaaaaatgtctcattactgtgtgagtcgagagaagaaatgaactcacatatcatcagcatttctacctctctccctatgtcatccctgtcctcttgggaggcagttcagttcccaggggactgtaatgcccctgaaaattgacagtcacattctattataacatattttccccatttaataacatggcctaggtaatgattcataatcctcaaagggcctcctgccactgacagctgaactcgagtaattgagaacaccatgcaatttggcggtgactacacttttatggttggatcaagagttaaagcaacagtatatctggaaagactttcagtaaagtgacagcctccttgtgatatgttccaaatcagttttacacatgtacctcggtctgtgtggcctggagtggggttgtgagtgatgtgctgatttcattgcttgtaagtccattatagacagggacattttctctttttcatctctggaattttagtgtctggattatagggcataatcttggtatacaatatgctaaagcatcattttctctgccttgtcctatgtttcttgggaaaacaggctgtcagtatcatgactaccacattctctaagatctgtgtgagccctgggtggactaacgtgactgattcactcatgcagctttaatgtctacaactactttttcctactccctgctggtttcagttaggactccatggggcatctccacaaatgccagcatccatcagtctcagaaacacagctcaggtacaacccgagatagtagagatggctccacttgtcatttctcatggtcctcctcagagaaccacagcttggtctgaagctctcaatagacttttgtgctctgcctaaaagattctctcctcctcaccattggcagcacctcagaataaatatacaacttggcacttcagcccttatcaacttcaagatgtgccatctacatcattaggagtgtgtgtgtgtgtgtgtgtgtgtgtgtgtgtgtgtgtgcgtgtgcgtgtgtgtgttcatgtatgcttgtatgggtgcatgcccacatgcctagagtgtatgcataaaactgggatccatatcacatgtctcggatcattctccagtttgtttgtttattttggtttgtttttgtttttgttgttgttgttgttgttgtaacaaggtttgtcattgaacctggacctcactaattctgctggttggcttgcaaactccagggatccttgtgtcttcccttcccagacctgggattacagatatctgctgtcacccccagatttttacatatgtgctagggatcaagctcaggttctcatgcttgcatggcaaacactttacccactgagccatctcccagcccctaaagcctaatttgtttccttggtgtgttttcagaattggatgtaataatatatacagttatactaaaagccatctggtatatttcaatgagcactcagtaattaatagtatattcattcttctgagttagacgttggactatgtaattccataaatatgagttgtagcagacattaagcaactacctgtctggagtcatcatggagtccagcaaaggtcaacttgccagggagttggacgtgcatcaagttcaggctttggtatttgttgtgtgacagacttttcttggggagaggtaacacacaccaatctactcaccccagacatggaacccatgacagactgcaccaatatccaaatatcaagccagttctttttcctgtggtcactaacaggggcacgggtaaggtggacttacaaggatcaggggtaactcaaaagcagctatgtcactagaaagcccaccctaacatgggtgacaactccctaacactgcagccctgaggttctctacaattttctgacagctcctcagtccccacacctctctttctgcactgtggtgttcacagtctccaccccagtgactgttttctcccttcttcattgttgaggggggggcttgataattttccaagctctcttctttgcagataattgacctttcctgtacctctccttatcagcaaaggctcctgattctcctccttcctgggacagtgtttcaatttagagagaatgttgggattcataggaacatgccacaaaacaatattgactcctctatggctttagtaatggctcagctatcagagcctcatttccatccatggaatttcagtctccccaaagttacccagatacctcacaggataggaacaaggactgaagttggtgatacccgtggtcatataatctaacactgtgctagggctggggtctgtataaaagaacttgctgcatgggtgtgagcatctgagttctggttagaaagcaatagtccaatactgacacccagcactccacagcaagatgggaggcagaaacaggggaatccctgggagctaacaggccagtctggaagacaagaacaaaggacaatagaccctgtctcaaacagggtgggaagtgagggaggacctacactgtggtgtctgcatgcccacattcgcatgtcccaacatgcacaagcacacagaatattacacagagtgaggcacctctttactctaatgtcccattctcctgtgaagggtgacatgaagtagggcagcctgcatcttgtgttcacagtgggtaacaggctctgcaacatgcacagcatagaacacaaagcccagtgagagaaactggctttccacttccctcgagtactgaagaccactgttgctgaagtgaggaggtaagggggtaagtcaggtcttcccctgactctctacattgtaggctaagtctgcactctgctttttgcaggcaaggctatcaaaactggttttgcataccataataaagcaattcaactagagctagagaaatttttgttgacttgcatttgagatatgtttttaacttgcagtacaaagtttaatttggattccatttcccctgatgaggaagagcatcgccactgtaggaaaacctgacactcctttattcttgcaaggatggtaaaaaaattttctgggtcacaaaacaagcaggggagaaagaaatgaaggtgcatgcaagactcataaaataagcattcccctgtggtcattattagacagcttgcattaagaggatgtcagccccgggagcttcggccatctttccttctcaattttccttgtttctttgttcaggcttgcttctataacattctagaaagatctgctttgcccatatttccaaagtgcttggaagtgctgattagcaattatcaaacagcactgtagggcttcgggaccccaataataaatattactctacccaagagcccaattgtggtgtttcttaaatccactgtcagagggaaacagtagcaagagggcttgaatggccatggtgccgtgagagacattcaatctaagttatcaactaaacgtgttcctacctgtgtgaatatcccatgagtgtgtgccatagtccctcttctctaagaagttgtttcatgggagggatcaggttgcttaaataagaaactaataagttgttgactgtagattgaagatgagaaaaatcaatgtgaactaaagagtcctaggaaggttctcatatagaatgtcaactgggatgagcttcccagaacagaaaaggccaacattgtctgggtggtactctctgctcatcagcctgttggacctgtatgatctgtccatggcatcatgtgggattcactaggatgagggtccaggccaactctcccagaggccagcacctctcccctaacaatgtacttcattgagcactcaacacatagtgtcatgccaccaccggcattattagtcctcctatctcttatcctaaagagacccaggtggcgcaatagccacacttctgaaaggtagaagggctcccacaccaggaatatgtcctctgtctttcccagtagaattggttctaaacagaatgccataggagctaggaaacagctgtgaagtaggtggagaagaagagaaagaagagctggcagctcctcccccttgcttgtccattgcttcccccatttctgacactcaccccatccacctcctcttccttcagcaatccttctccctcattcgctcagcacctcttctcctgtcactccttagacatggatatcccacaaagttttctccttaacttcccacctccctctctcagacatatcacctctgtgcagatggctgtcaatcctgctctctccaagccagacctgggctctgctctgagctccagcctattctccaagctttcacagtcttctcaaacaactcaaacactgtgactgcatccctgtgaaaaccagccctctcttcaccttcttactcaccatttcaccagtgtttctatttccttgtgtgtcctgagcatcccactacaaatataaagcccactctcctccagcctccccaatggtgatacagtacttccaagatgttaatgatgatggttgcagtgtgtactagtgctttggggacccatctctccatcaacctcctgggatccagagcccctatgctaaaaggaaggaagggggatgcttgcatgtgtgagaacctggcaagagatggattgtaaatgtcaaaatttattgtgctgaggtgaaagaagaggaagaaagttaggaaggagatagaatcttatgtccatggcaatgggcaaaaaggatgtgcaatggaaaggcactgtgggtccgatgaagcctgtggtgtggacatacggagaggctgggaatcacatgaaagggattcagtcatgctttcccatctgttcagtggtgttaaattcttctaagaggcactcattccctcatatacacataggaaaatattcccaccacttcttttaaaaattattattattaaaaccagcagagtaaatccatagcatgttatagaagagcgtgaaataaaaactcacgttctctgggattgtaaatgccattaacatgtactaacttcacgtgaacttcattccattaccaccatcgtgttttcatctcaccattctccaggggaacactcatggctcattctagattttagaaagtagtaagaagtgcagaccctcttcctgtgggaggggacaggagaggtcagtggcagggaaagactgtcctttgactcctatgtcttatgtgcagtaaaaaaaaaaagggggggctgcttactttgtttcagaaatgaccaaaaaaaatttcccagccagatggctgtcagaaaacctcccagaaggtcaaaacatgaccaggtttactgcttgcttttgctcagctgatgagcaaagagctaccttgaagaggataaataaaaattattcttcaaaaacatacttacctctctctggccatggatagatggcttattttgaggtttttaacatttcttaatcattcaacaaatatttattgggcactgattatgctacaaggacataaccaggggctttgttcaggtgacctgagcccaagcacttttaggaaaaagtcatcatacaccgacctcctaggttgtccattaagtcctggggaaagggacagtttagcctcagaaggaagtacatacaggttgctgctgttttgctgtgggcagtggcgagggaagagaatggccttttgtttccttgtgcttcttttattcctatgatagctgagtgctggctcagggtgcaagatagagctggcactctctacacctttaaaattccaggtgtgcctctattgactgacacttggaagctgatcctgtggttagtacagaggaaactctcttctctatgagaaagacataaccctcagacttccagtgagtgctgtgtagctgcctggaagggcaatggcctactaggtgacacacatataattcatgacatatccataataatatattaaagcaacatgacatttatggttcagcctaaacctgaatagcagcaccaagggatcctagacactgtggctgcattgcctgttcttgggaaatagcccaagtgggagctgctcacacattcttgtcctattaccttcacctagcagcacagctttctttagctgatctctacaccatgagtttgaaggactccatttccctcactctctcagggatgtggggctgccttattcaaaagacccactttgctgcctttgcttagagatgatgtgtagttatgaggccctcagcagggaaggcattgaagataggtctccaaggcctagaatttctctttccatgtatgaatgccatagtacaaatacagtttctaaaatatattctaaatcactatggagtgaaatatgaatttgttatgggctctctaggagatctgaaaaccacacttaagagacattgacctatgctgccaggatttcctctttcttcttttttctttcttctttctttctttttttttttttggacagggtttctttgtaacagttgtgactgccctggaactagctctgtagaccagactggccttgaattcacagagatctgcctgtctctggctctcaagtgctgggattaaaagcatgcccaccactgtctgactcctcttttttatcatattgtctttaagcaggcaaataatagattattgatagacagatatatgatggatagatgacagattgatagatatatcaatagatagagaggtacatagatagatagatagatagatagatagatagatagatagatagatagatagatagacagatagtttcactgtgccaaatattttaataccaactcacttttccctgtgaaaatgcatatgatattcccctgaacggaataccacagagcctaagaatgcagaattcttcaccagagctccagctattgagttgcaaccccagggcttgtgtggggccagtcagtatcatggggcagctacagctatccctgtacctttttctttcagattgctgtgtggaaagcacctagcatcccagatctgtactcaacaaaaacagaatagatgaaggggtacaaaatagctcaccagtcaggtatagagcagacactggaatcccagcatttggaaagctaatgcaaaaggattgccaagcccagcctggttctgtatagaaagtcccaggtcctgtgttttaaataaataaataaataaatacataaataaataaaatctaatggaaaaacccccaaactatcccacttatgtaaaacaagcactttcttttaaaattaactaagcaaacacaatcacatctgttcttccagttctggtggctgtttgctttaaaatgtagtcgcctgttccatttggagtttcaagactatgtttttgcaaataacagtaggagattccctggggctccccatagcctgaaagttcttcataatttgaaggtggagagagacggatggagggagagacagacagacagacagacagacagacagacagacagacagagaacaatagttgtagaaaatatttaaggttgaatagtcccttgaaatggtgggtgtccacatggtctgtgatgtacatgatatgcttaagcaaagatgtcttacttataacagagcggtctacaagatcataaatactaatgccaaataaatgtgtgggggaggtgtacaacctcagttgatgtgagagaaatataagcaaccatatgatcctatttttttcctcatgaaactgttcttaaattataatgctctgggtcacccagggagtcaggaagttaggttctcatgctctgtgtaagaaagtaattatgtcagaggacatattgtcaatatatatcagatgttcatgagctttcacccagttatccttttgaaaatttgtcgttaatagtcaaagaatcacctacttaaatgggtgcattcaaattatattttaataaaccttttgaaatagttactaaagtgttactcattacagtgttattaataacaacagaaatggaaagtcctagtgtcaaccttctccacacttagaagaagaattcagtcatttctttttgtaagggacgctgtggtatagccattgttctcaaaatgggctgcccaaagatgtggcctcaaactcatctacaatgaaaatgtccactcttagatacaatattgtatctaagaccaggctgatcctagggatgaaagtctcggccgccttccaggtgatttagatagttgctggagtatagaagcccctcagaaaataaatgcaactgataaatgagtacatacagtggaacagggtggtttgaggtccatgtatttgaaaagcatatgaaaagcatgtacaagcatgcctgaaagaggcactgcaaggacacatgtgtacagcagagtcctttatcattttctgtacatccccaattttctgcaacgctttcagactaacccatagtaagtaaaacaaaatgtttataggaattcttgcccagtggaaactctggacattcagacatggaggaagcttttgcacacattctgaggaggcagagggaaggtggatgcctgctacccatcagttctatggggaggtgtttgtcaagacacggtttctctgtatagtcttggctgtcctagagtctgctctgtagaccagcctggaatgcaaaggtccacctgcctctgcctcctgagtacttggattaaaggtgaggttttcggcaccatgcccagccttatacaccatttatcttaagtatggtgcatccagccacccactgtcagatccagaatcttatggtttctgtgtcatgtgcaaaaatatggctttgtctactgtcacatacaagaaagaaaataaatgtaattttaaatgaaatgtagatggtgggttcggggtgtaggtcatgggagctcttggagtttctgtataccagggaagacagcagtttccatgtcaaataaaagacttcatctcttacctcagctgccaccatctaagcacatttcttctgtcattagaagtatttctagttggtcatcaggatggttttgtttctgagaatacggtttttatatatgtacatatatatatatgtatatatatatatcatgtatcacttatattatttatacttatgtacatataaataaagtttatacagacaaaggcagttggcataccagccattcccaggacaaaaaagttccatgactttgtagcatgggaaagaacctacagtgggcctgcatctactctctgtctctagctttcccgtgacagggaacaggaaaggaacacatatgttgtctggggctggcaattgccaatttttgcttgaaatgaagtgtatacttcaactgctgagatggcccaggtttggggagagatttgtatgcatcccttaaaactacagaaagttcaccacgtgcactcacggtgaaggaagtgcttgaagtttgcttggcaatgagagtgaggaagtcttggctacagccagcatttctaaagctggagctctgtaagcactgcacatccctggaggggatgatagggcacaggaggcctgcatgctgtggattacactaacccagacaggacaggacactggtggagctgcacatgcagggctcctcatggctgattgggaagaatcgtcatgttattaaacagtgccagaccttgaggtattttgcatcttgggcagcctagaagacaacctctccagattctctggttctgggtgcctgggttcaactagaagatccctgaagacaggatctttatcttccagaacccagaaagttactggaactcagtgggtgccagcactaggctccaaacattgctgggtgttttattagccctataaaaaaatgttggtttgtaccaagtagatttgccaagacttgcttttatgagcctcttatgaaagcaaaaaatataataaaaaagagtcaaactgattctgcatgaattagatatgttggtcaaaaaacaaaagaaatcggattgataacaaagacctcctctacagtcatggacacactcctctaaagtacagtcatggacacactcctctacggtacagacatggacacacacctctacagtacagtcatggacacactcctctacagtacagtcatggacacactcctcaagtttatttttcttctcttaccaaatggaaaaaatgggacctagaatgccttaagatatgaaactggatgggatgcagcagtgtaatagaatgaggatgttttgagggtcataaaggcacatttcaagctactgattttggcatggacctcttagaagacctaactctctttatttgcaaattaaaggcaaacattgtaatgactgtgatttaagagacaggacaagctaggaaatataatttggagactaaaatgtgagaccttgggtattttacatgaagggtgaagcaaacatgagcactctgcttgttgaacgcagctcaggacacagcacaactgaatgaggacattatgatcttaaacaaaatacacaatcaactcagtagtcacatttttattttctcaaattcttctttgacaaataaaccaatgtctcaaaattatttagaaagtcagctttgcaaccccaaaacaattccactgtcaacccccttacacactgcctttctcagattccaagactccattgcccatctcacagactcaaaagtgaacctattaagagactaaaaaatatctccaaggttctgttcaaggagccacaccaggagggagtgaggtttatgagatgaggtaatagagtacaaatagaaaagcatcctgagtaactcttccctaagatgcctattgcttctgtgattgatttgtgtgggggaggctgatgaagttgaattccctcgcctttcccaccacgttcctactgcttcagggtctgaatgttccagtttgcagtacacaggcatcttctctgagactggtccccagaaacgctgctcactttgattagcaacacagtttccagagactttccttgatgtcattcttacgtactgtgcacccaagacattgtattatggaaaatttatcccccccagcagaaattggggtcactggtgttgaggaaatggtactaggcatgtcaagttaccccacagctatttgtcaaaacttgaaagtgatgaatgggtgagtattcacattccagcctctactaggagttgtgaagcccgagtcaaaccacacccattcctggattttgtgtgtgcacctactgtgtagaaagtagagagctatatagctagtcattgtttttctgagtcttataaaaagtctctaatgcgtgaaatattagttcctaccttagaagttggagaacaaagatataggtcaaccatggtatgtacccaaccgtcatagttggggttgaatacagaaatcagacatggagtcttattggcaaaccagtttaaaaaaatgactttaggcctgaggatatagttaacctgatagagtgttttcctaatttgcatgaaggcctgagttttattcccagaattggtggtatacactggcagtctcatccaagaactagggaggtggaggcaggaggatcagaaatgaaaggtcatcctcatgtacatagtgaattcaaggcctatctgaggtacatgagactgtatctcaaaatatatgtgtatagatgtgggactggggaggaagcagataatggagacggcaacctgaaggatgactgaagagagtaaatcagagagtgaaccccagccttgatgtaaatagctctgtgtggtcctatgaacgtaagcatcccagggattttataggctctgaagcccctgttgcttctgtctggcttcctgctgnnnnnnnnnnnnnnnnnnnnnnnnnncaagcacttatcgatttcttccaataggaagaatgtgctgcagtaggcaggagcgatacaaagcttattaaaacatacatctttatcgaattcaaggcaacaaacactacatgtcatgcaatcaattacaatacaccaagaatgtgatattaactcaaataaagaggatctggtagagagcagagactggaggaagtgagctccaagctccaagcctcagcaccaccacttctgagaacttagaagcaattcaggttttggggtttgctgtagagatggggctggcccagggctttgcccagccctcctataggtaggatactccctgcatcttgagatgcatagatgaagatagggctaggagctgagcatggcttcatagaaggcaaggtaagggacttaacagtcaatcagcctggggaggtctttgcagctgatttaacaataggctcttgctgtggaggtctcacacagggttcccagctaagaggaacccacttggcagtagctgtgtaacttaaaggcaatgagaaacaaacacaaactctgaccacaggtctctcctcctgctcacgcgtctactgttttttccattctggtttctatgacaacaggtctgatacaacttgtatttatgaaaatcacattaatttcactaaagcctcagggattccatgtaaatcaatattttccaaatctgtggatcaagaggccttcaacttcttacaaacaggaaaagaaagaagaactttgctcccaaagtgactgggaagggtcagaggcaccccccacacacacacccttccttctactacgggttaccaatccttgtaaagcaggcttctttttcctaacaagccaaatcttgtttccattcctgaaagggaggcctgggagaacaaagccacgcttacttctctccaccatgctctttgtgcctggtgcttttgtgcttcagatagctcttgtaagtaaattggagcacacaaggagagtagagttggaggcagcatgcctctgttgccatcctcccgtcactctggtgtctgttaacagatccactgtgaaaataaaagataaactccagggcaggggaaatgatagctcaggcagaaacatacttgcaagagtagtcagaagtaccagaacccatgtaataaaaaagccctgcatctaggcatgtgcctgcaatcccagcactggtgaggcagaggcaggtggacacttggggtttgctggcaagttccaggacagtgaggcataacttctaatgtctgttttctaacttctacacacagacacaagcacatacatccacatgtgtgtgcatacacacacacacacacacacacacacacacacacacacacacacacacacacagacgtgtgtgtgcatgctaagtaagtaaataaataaaataagcttcataattaggactctccttcaggtaaccaggacatttgctgggatgttggggacagtctctcctacccacagccagtttccataagcatagagagtagagattctggaggctctagattcttcctagcagcttctccatgaactgagctttgagagcattcatgattgttctggacttcttagtgtcacaatgggaaatataggcatatggcccaacctggggcagcctcatgttggcagagtctacctttgtgcattggtccagtcatccaagaatgagcaaaggcaatctggagaaagatacctggaccatccactgtgttaggaaagccaatacatgccaacaagactataatgatcgggactgcttcctctgtaataaactgattttttttcaccagcccacagcatgtctctctgtgtcccctctttgtctgtgtaatccattttaagtaattgtcatattctttcaggcaaacactttctgcttaggctcgtcttcccccacaggccttggataccttgaaaacaggaaatagaatttatacttcttttgaaaacccaaaccacagccttggaagcacaataggtaattctccttgaactgaattaaagagggatgggagacaagaattagggaccaccctccctgaagctcaaaactgggaaatttagggcaaaaggaaagtgggagggaggggaggagggagacagatgaccttaactcggcaggcactgagtgtgtggaaattattccacacaaatgccacgtgtgcagcatctgagagtttctcctctctggagcctgtctactcacagcagtctttgcacacaagtcaggtctgtctacacctaatctctgtgcctaatgtgatatagagacagggtgaggtagaaatgaataaagaaatacaactgagggggttggagaaatggctcagtatttaagagcaccagctgttcgtccagggacctgggttcaattcccagcacccacacagcagcttacaactccagttccaaggaatctgatactttcacgccaaaacacatataaaataaagttaaataaattattaaaatatatatgaagtgagacttttttataaaaaaaagaacgaaagaaaggaagaaagaaagaaggaaagaaagaaagaaagaaagaaagaaagagcattgcttccaagaatcaaattttctattccaagatcttttaaaaagcagctgtttgtagtgagttctggacattctagatacatacgttgttctctccggttgacaagaaagggaatgaggagagacagctgagcatgttttagcaaagctcgaaggtttgtcatgaaagttcacatcacttactgtacctccaccccactggtggtggccgtggggtgataaacaagactctgtgtgtgtgtgtgtgtgtgtgtgtgtgtgtgtgtgtgagggcagctgtatccactcatggttagatctgtgtgagatgagggtgttaggaaaatgcttgcagttcttgctttagataagacaggcagtccctccctgctctcctggtggcacttctcccagtaactgtggctctgaaccattcactcctagcattttgaaactgcactggattctccaaacaccagcttcaaaagacctacaaaacaattttatcagtcttttccttagagtcttcccttctagcactggcttcctcaactgaatcacggaagaactgactggaaagattaaatcctatcccccctgctgcttgctcttcgctcattctgtgtcgctctctgccttgcctgccgattgagacacggctgtggacttttactaccaacccctgtaattacagagtccacccaccactataagccagaaatggagccaaaagaacaacaagtttaggagtctgttatgttttgtttgtgttgcctcataataccaaagttccagcccagagtgaagcatgatctgaagagaacgggcttgggtccactgataatttgccttttggttccaacaaaaaaggtagagctgctgttgtgatttgatcttggctttttggggtaagcagtaagcacccttcacctcccctggttaaactcttaaggtggttttctcaaagtgattaatgtgtcctcaagtcacccctgtgaggagactgagtatctttgtttttcaagctggaaaaaatgaaacagaaagcttaggcaattgcccactctgctgggatggaagcaggaggagtcacagggcgcccagatcctcagggtggctcggagggcgttcttgtccggtgcttcttgggggcagtgacatgcagccactcagggggtatcttccgaggtgccttttccctggcagacagttacagcaagtgaccttcagctaagctgtggaaagtctaagtgactaatttaatgagccttcgctgtgtgataggaggaagagacctgggcaagggagtagctcaagccatgggccatgaaggagtgctgagggtgagaagagcacccaagaggtcagaggaaagtgggcgcctctgtgtggccaggaaagggcctgagcatgtggacatatggaagccctgtgtgacaggagaaaagtgtgtgagccaagaggagcatttcctgtcgaagactggcatggtgccaattcttccaggagctggaaataggaacagtggggggcggtcaacgcaaccctactcctctgcaggttttacaaagccttgaaggcgcttgttatgtccgatcctccaagctcatttatgtgctgcattttctcagtgcacaggggccacggtgccatgatggccctgactgacatacatcacaacagcctctccacccttgcaatccttctgcctagcagggaggttagaaatgttaaaactggcgtttgtttgccaggcctttgcctctccatttacatcaagagagaatccgagagagcaggaggaggtggagatcacatgattcttctgctctccctggctcatagaagccattacctgccaggaagcatttgtcactggatagctgaatccacacagagcatgtttggcagcatggaagacaactgcacttactggaccagaatgctctaactagccagagttcctcctcatgttttcttattagacttgtgaagctgtgaagcaagtggtaccgtctggaggaaaaacgcagggcagtgagtgctgggagtaaagtctataaagttcttgtcacacctcgtgaagatctgtgtttaaccccgagcagagcattagtgtgtacctgtaatctcagcaccaaggatccctgaggtttactagacagccagcctagcataattagggagttctatgcttggtgacagaccctgtctcaaaaaactaaaagggaaaggaactgaacatgactaatatgtcaacctctgtcctccccgccttttgcaagtatgcatgtacacacacacacacacacacacacacacacgaaaacaaaaatggctctaagaaattcataatgtttgatagcagaaaaagctttgcagaagcaactagaaggaaactctggatcctgtgggcagttccagagcatttctttgtaggaatctaatccctgccgccatctgctgtccccccatcctccatctgacagacaggaggaccactctatgtcacagtttgtaagggagcgtgttaaagatcacctttccaatcacaccattcataaaataaaaatctaagatggcaaatatatcctggagtcccaactccaagcatccgtgtaagagtccccagtgagaaagggagggtcagggtccagcactcttctagcaggatcaatctaggagccaaagggtcacagggtcaccactgctagggcctcacagagaatagcagtaagcctcaggagtggagacagctcatttcatctcatgtttgtcaaaagaggttttttttcttccccctgaggaagctgcagccttgtgtttgtgttctcatgtgtaatcttgaattactatgtaccattcactgaaggactacactgtgactgactgtcctggatcactctctccacaaccccagggttaggcaggcgttatgagagctcctgggactgaactaagccgagttacatcctcaccaaacaatactggaaagactttgttgttgtctggtgtctcagagacttctgtcctgttttcctaagtattcattttccaagtcagcacaggcaataagaacaaaaccggatgtgcagatgaagagcaacagagggctggaagctattgtgtttcttggagtgaaccttgcagtggagtctggggatgtttgtatgaacagctatgttgcccacaagtctatgtgctgaggagtcatcacacccatgttactggttgtaactccaaagcctgatcaggagccagccaattatgttctctgcagggtatgtgaaaacttgttagaaatgcaaattttcaggcctcccccaagtcctactgaactgggacttctgggggcataggtctagtactctctgctcaccctaagtaatgtttcattgaagtcattaaagtgggtttggctcactgtgttacattttgcctttgctagtgtgggaagaccagatgtgcaaagtcaaggaagtgacagactgaactcaagtctgttgcaaggcgttgttctaaatgctatgagtgagctgtccccttattccttgaggcaatccagcaatatggttactatttttggctttcttttatagatgaagaaactaaaacacaaagctaatacttcacttgtctctgatgagaaatcttagaaggttccaaaaagtttattaaaattcaatgtaacacttttaaaaattagaggtagggctaacaaacccatggtactccaaacatccaatgtgagaggggacgacgccatataggtggctttgttgtaatagggtgccaggtgaagttagttacaaagaaataaaactcaaatccaagcaggttaagtccacaaccttgtcctgtgcagtgcactctaaatcttctgctagttaatactgcttcatgtgatgataggaaatggaaagcatgggcctggatggaagcaccatttgagactaagaggtgccttgttgttctaaacccattgtgaactcatgaaaaaaaatctaaaaacagaagcagaaaatccagaaagtgcctgaacttcaagggcagcttcccagcactgcctccaagctttctgtctcttactgaaaggcaagcagagagagatacaggaaaagagagggacaggcagagagagatagagatagagatagatagagagagagagagagagagagagagagagagagagagagagagaagcaggcagtcaagctgcttgtcttggggacctatcgctaagggctggtcacctagaatgccctgacatgttgagactacattgttaagctacattggtattcccccagcaaaactgctatcctcctggacccaatcagcatgctgtgaacatgagctctccttgactaaaaacagtgcaagttcctgctgcaccagtcaagatgcttccttgtttcacactaagtgacttaaagaatatttctgattagcatgctcatgtgtcaggaaactgacatgaattttataatgcagggaggggaagatggacacgttcatggctaaccccacattccctctgtttagcaggaaaaggggacagaatgtaattgtttacctgggatgtttgcaggcaatgtgctatgtgctatttacagtgagtggggactgtaaagtttatgtcacaggcatttggacttttgagttggctgtttggttttctgttgtatatgtttgggaagctaaaggagttttgctggaaatgtttcttagattcatcaatggaagtaatttgttaggtattaacaaggaaatgtagacagaatctgtgtgtgtgtgtgtgtgtgtgtgtgtgtgtgtgtgtgtgtgtgtgtgtgcatgtatgtcaggtccaaaagaaactcaggacaaatggctatctgtggtgactatgagcatgctggtatcctggctctcctgacccctacccccaccctaaatgtcttcatctcatgagattcctttccccagctttgcattcctatataaccctgccatttctcccatgtgctctctctctctctctctctctctctctctctctctctctctctctctttctctctctcttcctctcttgctcctcacacacccttcctctcacggccctgtccatgtttagtctactactttctctccgttttcaggactcttccagatgcctctggctgtgctctctgtcatatctagaataaaaaccttcccctcaaccataccttgaagcagtcacatcctcactttatacatctggtgccaacagacgaagtcttactatgtcgctctagccaggaacttgctgtgtacagcatgctggccttgaactcaaagagatccatctgtgtcttggtgctgggatcagaggtgtgtgacactatgctcagcttcttcctctactgataataacacacagatttcttgcctccacatattacatacaaacatctttctttcaataattgatcctagaggtatggctggagcagctactggataaaagtatgaaggttaattacatgtgttagctactctgcccttctggggctttcaccaccttaacaggaaaggtagctgataactatgctacacaatacgatggactgagatggcgctgtggtagtatctaagagtctccaagagagcatttcggcccagcctagcagatccctgagataagggcaagaagaacaagtggcccaagctgggcaaagccagggagcccagcacattgtgaaaagacaagtgtcctattagcctggaaagaatggcaatttgatgagggaattttggtgtgccttcagtgggcatcaaaaagcagctttgtgtttcacagaggacaaagcagagctcagcttcaaagccatgaatttcaggctttcatctgaactcaaatcaccaaagatttgtaaagtccaggaacagattcagtgactgtgagtcagctttccattactgtaacaaatgcctgagttcaccttacacagagaggggtttctgctcacaccccttcaagttttgcatcccgttactttgggctagtgtcagaacacctttacaacaacctgcaggagagaagaagatggccaggaagtaaaagagaatgaaaaaaagagtagagatagggtcccatgcaatcctttaagaccacatcctcagtggcctaaagacttttcacaaggttgatcttttactaccttctagtagagtggagggcaaccaagtaggcctttgacacgggaccttcagagacactcaatccaaagtatagctttcagccttggtcctcaaggtttcatgtctgtctctccatgcaaactgtgtgcagtctagtcctaagaggtcaccagagtcctaactgtgtcagcactgctccagactccggccgggtaccagacacagggtgtccaattgcaggcatcacactaggaagagaaaacagagcagatagtacatcccaatgctcccattcctgcatctggggcctactgcagcagaatgtggcattcagggacacacctgccttttacctttgctagttgccacccacacaggctgttcctgcagctcttcctggcagatgctcttccttgttgacttagtaacttcccaacacgggaatcactggcctctgcttgccttgtcagctggacagatgaacaggacacagaagaacacttttcttttgtttttggttttgtttctggaatcgggatcttactatggagttctgcctatcctggaactagctatatagaccaggatagtctcaaattcacagagatccacctgcatctgactccccagtactgggaataaagtctgtaccaccatgtctgcccagaactcttttcctgattctccatgtttgaaagaaatctgtgtttttacacctttaagctttgccaggtcaggcagctttccttgactggcatgtgactgcagcagccccgacctttgatgaaactctctgcaagctccttctctagccaaaatgcaggtttttttccaaattcttgttttaaaccaatcacaaagggtttttccatgttgttaggtaactagtgatagccaagaaccatttctcaggcaccagtgaaaagttagtctgcttcctggtgctataacaaatgcctgagataattaacttacgagcagaaaaaattccttttggttacagtttggaaatttagtccatgaccagttggctctgctgctttggactattggtggcatataaggtttggggtagtgaggtagtgggcctactctccccttccaggggcacacatccagtgacctgaaaacttcctacaagttccaactccctctcaaagttccacatgccgcctgtaacgcagggtgctctggaggacacctaagatccaaccattgtagtcagtccaggaagggacctaaaatccgtccccttgtctcagatgctcataggtgatgccagtaagcagggaagctttcagagacagaataagttagaatggggggccactgtgaggcaggggttacctagtgacctgacatgtgcataacaggcctgaacttatgtgctgggaggagagctgaaggaagcctagcagtcccagtttctgacttaatatggcttgtataggatgtgggcatggttgcagggaggattacacacctaactccctgtgttcagtcatcctgcgaagtcccttggtttcaaagctgtatttcctggcttgtgtcttgctgctgctcctgcatgaaatagtaatgtcattgtccatcccctgaccaaacggcattcgcacaactctagtaactcaagtcaagtgctgtttctcaccagaaatcttccctggtgctttgcccaccacctaaccctgcactgggttaagcatcagcaagctgccatggcatcttgtaaggtctcctattagagtatggtatggtcccatcacccagtatctgtatctcagagcttcctgaaaggacttactttatatgttttggactccgctgttcccacattagaagaaactcaacaataatctactgagtgaatggctaaagggtgagaaagagagaagactgtctgctatggtactggtgacttctatttcctcattgctgatgatagagcaaaacagaacatgtttttggatgggggcttaattgcatttggtgtatggtagtgtgaaggagccaagtacccatatgaagaagtcagataagtgttcaacaacttagaagacagccctgtaatgccttcagagttacctgcataaaggtaacagttacaatcatggcagaggaacagataaaaacagaaagataaacaggcaaagccaaggtgacacaaaggaagagagcagcagagaggcagaagcacaggaaggacatagagaactgagacacacataaagcccgatgaggcaaaaatctccttcagtttggaagacctcctgtgatatcattgtcaagacaatgtcaaaagtgtgatcttactcatggatgaccttcgaagcattcaagaggtcaagaagaccctaaaaagaagaaatttgagatgttctgctttaagagttaggcctcggtataagatctgaattaaaactccacttcatatccatgttccgaaggtcttggttttactcttctagcccgggaatagaattccattcataaaaatgtaagtggacctaaaggttggttccaattcttccagcttttgttttccaaaccacttcataaaataatctgtcgtttgtcttacagactcatgtcacctcatatagacagacagaatgaccaagatcaacacatacacagacacacacagttttatacctttttatacatggtagactttgtacatttgaagaattgtaagacatctcagacaaggacattttcctacttcaaatctgacccctgtatcattgataacagtgtgttaaacagaaaggaatattcaagcttagtcttgggcacaccctcaattcatactgagttggcacctgcaagaccttcaaaatgtaggatcatgttaggcattgattctttgttgccctgtgaatcctgccaacagcctcctagtgaattttctacgtttacttcacttagaggataatgttttgcctcaaaatactgttggaaaatctcagagctgcattcctaacaaaagcaacccccccattcatctgtaacaaccccccaagaaaatccttcatatgaatgaatagaacaattcttcatgcccacagcagacaaacagcagacagcccaagtcaagtaagactgaggggaagaagtaacagggacatgatttgttcttcataattacacattcagggagaaaggagtggagaagaaagttccttttaacgtgcctgggcatgacagatgaggtgttctcaccaaagctgtgcctgagggatgaatgtgccgcagccttgtgagagatgtttttctctggaatgctggagataaacacccagcattttactcctcattttcattgcgcttagaggcctttacagttttctgtgagtggcaggtgataggagaagagtgcaccaggccttctggggcctgcagcaaaagcaatcctttcttcaagacgtgggacttgagcacttcagacacatttaatcctagccaacactacccccagcatatgtacatgatagagttagaaagaagactagagtgcaaaaacctacttcatctctaagcttatcttctccttgtaaccagtttgcttaagtgcaatatttactcaaggattgtttaagcaaaaaccaaggaaccaaagctcaactggctttatttcttctctgatgtggaaaagataaacaatttttttaaacctaaaacagtctctgctaatggagaagctgaatccaaaagattcttacttgaactatggaaggcataaatcatatctgtgatttttccttctaaaaatgaaaccattggtgctggagtgatggttcagtggcaaagagtatatactgctcttgcagaggccctgaggtaagttctcagcacaatgccaggcaactcgcaaccttctgtaactccatctccaggggagctgataccctctttcggcttccaaggtccctgcactcctacatacccctcaacacacacatatgcacataattaaaaacaaaataagccattgttttaaagaaactaatgatacagtttatacaaacctgattggaggaggaaccagtgagttcacaaatcatttcctaagtccacgacgaatttgaggataagagaatggaataactgttaaatataataattgtaaaatatataaatcaagtcataccatctacttttatttctctacattactgtcctgtgaggcccttgcttatatcatctgccatgtaagataaacccataaacagaccttctgagatttgagaacacctagagataacaattttatacaacagaaagcactacaaagatgggttagctttgcagtacagattctgttgtttctttggttgttcgtgtaaacacttagttattgcaattgtttttaagttttatacttaaaatgagccatatactctgagtttaaattatatgacgatacaatgaatttgatactaaatcttaagtgaatattctataaatgcatttttttgagacaggatctcactttgcagcttaggccaatcccctacctcagacttcatggtggtggaaatctggtcatgcctagcttaacataaggcagagtctaatacattcaaacctttgcctcacagtgaggttaagagaatggactggaaactgtattttatttgattaaacagagtatcaccatgtctgtgtgtgacaaactgctcactccaatcttccccattaccatgaaagcgtatagttctaaaggtccttacacatcatgattttatggtgctagcccatgtgtttgctaagactgggtgtttgagggttgagagcaggtgacaaatggaagagacacaaccagaacccacaagtcctgactcccagacaagtgctgtttctaccatgccaggcagttgaaaattcccagccttatcacatgcttctcatcttttccctttaaaaaaaaaggaaaaagaaaagaaatcacaaagcagcatgatgctatctggcttgtcactgtcaatatctctgtatgtgagtgaggaggagtaagagagagaaaaatgttcctgtagatatttttgcagagataggatagtgcttggttcacatccaaagatcttgagcaattaatgagactattgtccacaagttggtgcagggtttagcaatgagatggtagctatttggctgcttctggtcctgctcaaggtctccagggacaaaacaggaaacagggccttgttctggccaaagctggattcctgtcctggccctggacaaaaatggcatctcctagcctccactgtagcatgccgaaaatgagggaaatgaccactattcccctagttctcagacctgctctaaggatccagtgaggaatgtgtgttcaaatttcttgaaaaccatttgtatcaaaagccacaagaatgtcaaggactgttattaatatggttagtagagcactgagaaatgatggaattaaaggaatgccttgtaccaaaagttgaccaggggcaatttctatgcttattctctgagtctaaaaagcacatttatacaaggtagtaatgattgtagaagtgtgtgtgtgtgtgtgtgtgtacacctgtgcacatggaagccagagattgatgtcaagtgtctttctgaatcacttcttcttcttactaattgagcagggtcttccactgaacctggggctggccaatgagccctggagatcctcctgtgctgacttcctactctgagattacagctacacacagccacagcaggctttttacctgcatgctgggtctgtagacttgcagagcaagaactgcaccaactaaaccacctcctcagcccccaagtattagaattttgagcagccactttcccagtttctttgtgtttaaacagggtcaaattagaacagcaaaagcaagttactgaccccacagaagcaattactgtctcccaaattaccagatacaagtggaggatccctgcagctttgaccatacatcactataaacattctcacagtctctacaaccataatggtatttgctgagagtgagatgaccaaggactgacatgtttttctgtttcttgtttgaggactgaccatccgagtcttccctgagtcgtggatttcttgattgtccaggaaggtttttgcaattagtcatatttagctgaggcatattatccagctacaggaagaatcccatttgtcagcagttttaaactttgccaaataaaggctcattggcgaatggtggtgaactctgctaatggcccaactttagaaaacacacaccctgctgagctgtattcaagccatggttctattgaataaaagagaacaacaatgcctgctttcaaccactagagaccctttgcattccaataaaagtttaaattaatgttttaaaaggttattgctattttttcccatttagctgccatcatttatgagttgtatttagacaaggccctacgttattttactatttccttctgcacaaaaacaagtgtttgattacattagctcatcagtgtctggctttcattagacaaacctgaaataccctattattaagattaaacaaaaaaattgttgctttcttattcaaaacctattattttgaggttactctggccagaggaaatgacgagacgtttgtacaaaacctgacctaaagatgctccaagaggagtagctcagccgcctctgcactgacaggggttgctctttcctgggatggtggaaaagaggtggcccttcacatctttggaatttgcggttcctgctgtgttctgaaagggatttgaaaggggaaagtatccttctgctttgtaatgccagcaacattgtgaggcgtccctgaagctgcaatagagcagcacttggacctgagggttctaggatctgacaactccctgtcacactccttgtcactttggcttagcctgttgtcctctcagtctcattttcaaaccaaaacaggagcaagtggtgcacactgatcaagtcacatggacaaatgggcaacagagcgtggagacgactttcatagaccaaggcttccctaatggtcgcaccatacttgtggtcacttcagcctcttcagatttctcccaggggtactagaaattctctaggggatggggttggagagatggctcagcagttaagatcccttgttgcttttgcagaagacctggctttgattacaagctcctacttggcagcttacagccctctgtaactccagtcctaaggaatcccatgccttcttctgtactcagaaggcaccaggcacatatgtaatacacagacatatatgcaggcaaaacaacacaaatacacataaaattaattaattaattaattagaaaagaaattatctaggggaatttcatatgtgatggctaacacttttcacttgacacaacctagaatctcttgggagtatcaatgagggactatctacattgacttggttgtgggcagaaggtcttaaactctgtaagagtggagacatttgagctgcccataagggagtgaggaagtgaacatgtatgccttcatctctcctgccttgaccgtgggtgtgatgtgactggctaactcttatatttttggttgtgagcttagcctttaatggcggagccatctctccagcccaatggcctgctaacttaagctgctgatgctatgactgctcagaaataataaccttcttgttgccagagcatttcataacagcaagagaaattaaactagggcaggcctttacctctgaactatcttatgagtcttttgtagcttagacatcatcgctccaagagacataccccagcataccaaagagggagcaggtacccatcctgtgtactggacactgcaatcctatcacactggttacctatttgttagtttcccctgtacagcatgagatatataatgtcaagttgtcaattgcatcttttcactgtagcatttgccagaaccacaatacatgctaaagtggtaggccttgactaaatgtttattaagtgaatatctcatcaggctagctgtctcaattttcccatcacactggccagcttcctcgcaacctgctggaagttgacgtgatggtggtaccatcctgcatctacagaggcagctccattggtggtacaatagtgtccactaaggtcaagagcctcctcaggctctctgttgaatccccaaattccaatacttcatgattgtatttctttgcttatcttagctcagtgaccttggactccaaattcaagaatcaggcatggcccttagacagtgggaagagagacagaacgaaagtcaaggtcactgtgttttcctttctctaccatagtggctcagactgtaccctggtcctcttctcaagaaacaagattcttctgggaatgttgtttgcccttccccttaaaatggattgtcagccctattctgagggtaagcacaatcaaagttctaccaagagcttctagtgtaggatgaagggtgtgagaggagcttgttgctcgtagacaaatttattccctggtgctttcagggaaatacttagtctcctagcatgattgtcaagtaaaaccagggcattccactaaacttaaatgccttagaaacaacaaagatttgttgttgttcatgtatgaatgtcccaaatacttcatggtacatggtatttttaaaaatcacatattaacccaaaactaaggacacaccaggtgataatgttgttgttattaccccatagtcccacatattagtattagtaatgcttcagtaactagccataaaaatataaatcatcaatagtatggtaaaatggagccaaacgttacatgattcatttctctgaaattcaaattttgctgggcactgtgtattttcatccgttgcatctgtaagtactagctctgagtcagaagtcctgaacagtgtgtccctgcagttattagggtggcctttcatggaatagatggagccaggcaagctcatttgacctctttagcccacaggcttgaccagtcctgactgtcactgcattagcaggttctggactctccatgaccatatgtggatcttgaatactgaaagctgtcagtcaccagagaggaaatgcaactactgtagcattactctagcaccagcaactaggtacaggaggagacaggttcaggccagatggactacacagtgaatgagactctggctcaaacagaaatcaaactacacaaagtgaagaaaattccaggaagacccaaactcttgtctcctgcaggccattttctcataactaatggcctgttcctcatcagaagtgtggtatccatggtttcccagtgtcatttggttctgttctacctgggtttgttttaagctttctgaggactgaggaagtgagaagaaaacataatttctcaacagtggtgaaattagcctaaggcaaaaatctggaaattaattgtcctgaatgggatagactcttacgaatttctctctcttctggctttttagtttaccaggagtctaaatggaggcccgcataaaccatgccagtgcccaggcactcgtaacaaaaccaaaggaaataaagggtaatgaagtcatccatggaagcaggaagcaattaagcacatgaaaaaaagaagcatcccccatgataggcttcagagcaactcactgaggtctaggaacgtgttgttctcaaggtttctcagtccgtttttctagctttctacagcttccttaattcaatagcttttcattttaaaattatagaactgtgcagtcattacctgcccacacacccaggtgtttattgtgttgtagagtccatgtaggtggaaagatgggactaggcagtagagaaaaggatttcaaaggtccttccggtctgcttctgcttgaacagttggtattatctggtgtggctctgggaaatcaatcttctgggctgtcttctaatataaataaaacaataaataaatgattgtgtaccaataaaaggaagaagtatcagaagaaattgtgttcccagctgtcaagtcacctttttttatgaatcaaaagtcttgtggttcttgacaaagagtgtcacatggttggagagttgttgtttttgttgttgttgttgttgttttttgtcttcctcatacacccaagagaaaggaaatacttgagtccaatatttacaggagtgatcattgttagatgaattatccaaacacatgttgtctaataaatatgatatctatataaagttatgctgttcacaagtgcacatactgtcttggttagtttcaactgtcaccgcctagagcagtgcttctcagccttcctaatactgtgattctttaatacagttcctcatgttgtggtgacccccaaccataaaatcattttgctgctacctcataaccataattttgctattgttatgaatcataacgtaaatatctgatatgcaggctatccgatattcaatccttgtggatggtttgtttgaccccaaaaggagctgagacccacatgttgagaaccagtggcctagagcaatctgggagaaactgtgtagactgtgaacttgtctgcgtggagggtgtcttaattataaactcaggtgagagagcctagcctgctgtgggcaatgtcagacctaggcaggttgttctgagctgtataagaaagctacctgagtataaacttgtcttccagaaagctagcaaacatccttcatggttcctgctgtatctttggctgtgaataagttccttgtttgaaggtaatactgtaaggaatagcaagcaggcctgccttcaaattcctgtcttgacttccttcagttcagttcctgtcttgacttccttcaacttccttacagttgaactgtaccctgtatgtttgctaggttgctttgagtcagggtgtttttattaaagcagcggagtggatgccagattatatgtggagaatagttttattagtacaaggggctggtatatgttccttgtgagagtctgaacatcaagtaccatcctagatgctaaaagctgcaaaatttttaaagaactcttttcaagaatattgaaattctccatatgaaaaggtgtaattcttgaaaggttcaggcattatgctggcctgcccctgttacctgatgaaacaggcagtaccctggtcagcccaaggtaacatgggaactaagtctacacacaggtgcagaggatccctttgaaagataagtccctgcccctttacgctctctctctctctctctctctgttcccgttctctctgtttctctgtctctctgtttctctgtgtgctctgttcccttctctgtttcccgctctgtctctctatggcgaccggccatggcggtcagccatttaccctgttcctcttcttagtctccccattctgctggcccttataataaacttatagtcaatatgtctgtctcggcaatttctcttttctgccttttaaacaaaacaataacaattcttccatattagaatgtgaccactattgctatcagcattttgttgtagaggatagtattcttcttacttcatggttattgagaataggtctttgtaaatgtaaggaacatggccagataactagagaactaaaatgggatgaacattctagccagggttgaaaagactgctcagcagttaagagtacttgctgctcatgcagaagacccaggtttgattcccagtatctacatccagggctcacaaccacctataattccaggtccaaggaattctatgcttcttctgtcctctgtggacacctgaatgcaagcagtgcacatacataaatgttcaggtacacatacacattaaataaataaataaataaataaataaataaataaattgcaaacattttaagtagattcatggttgaggggttcatacaacttgctggtctcaagaggaaaccttttttgaggtccttctcagactgtggtccagaggttcttttggctcatgtgtttccaaatgagaatatgttatgaactcaagctctggtgggtcccctagaaagcactattcaccattctggggttctcaccttctcctgggtgctggatacctacttaggggtagggcaatcaagaagagaacagacacatctccattagcaaccattaaagccgagcgctctgcaatggatttttcataaattctctgagtagcttggttgaacacaagacaaagagcagccactgtgtgccctcttcacagacccatagataacttcctagaccatggcccttcaacaggaaaacaacaagacccagtgcaaggaccctaacatgagctcaggtggctgcagggaaatcagtgatcaaaaagcttaacagagaaacatgtttctgtgcacttggtattcaatagaatacggatttagggatttttgtttgtttagggagtgttgttattttttgtttgtttgtctcatactttgctttactttaccacttggaatgtgccctgtttgattacagaaaaggttctgaagtcatacaaaaggaaaactcctttgtttattagtatagctgtatgaagggtttatattgccgggctgggccacagctgccatagccatttcctaactgttctatttaaaataatatgtcagagaaccagaaatctatggggccttttgtagtagatcagtacttatccctaaaataggaatagactttggaagcccgttccacatagagggatactccctgggcctagaccctgtcgcaaaggatatgatagactctaaagacccccaatagaaggcctcaccctccctggggagcagaaagggtatggggtaggtagggtgttagttggaggggggggcaaaggaggagggtaggcagtgggaactgggattgacatgtaaaataatcttgtttctaatttaaataaaaaatggagagaaaggaaaaaaaagatgtcagagaacaaatagcctgccagtcataaagaccctgttcttgatgaactggaatactggggctagggaggaaagggagtgttaaactcacagatatttaatattagtattaataaaagatgtctgctgagcattaagggccaatgtgttcagcattttcaggtttcacttaattattttattaaagatttgtttgttttatgtgtgcatgtgaaggcctgcatgtaagtatgtgcaccccttatgtgcctggtacactcagaggccagaaaagaacatgggatctcctggaactagagttacaggatggaagcagtcatgtgggtgctgggaatgaaacacaggtcttctactatagagcacatgtgttctttttttttttttttaattgttgacctattcagaaaacttgtatttttgaccaattctcattcagttacatgattccaggagtgtatatggccaagatccacaccttaagaagccatgaacaaagaagtccccagtgataagatttctcacaaaaccctctgagagagtctacacctattgaaaagtcacatttcatcttagtaaaaaggacacaaaaacaaaaacaaagccacctatcccatcctccaaggatgtgcagagcacatgtgttcttaactggtgaaattttgtaatttgttcataataatatccctcatccaggtgattaatattgaccacaaaggtacacactgcccattctcccactgccttttttctatctcctctctctgcctccccctccctctctgtctctgtctctctctccctctgacacacacacacacacacacacacacacacacacacacaccgagagagagagagagagagagagagagagagagagagagagagagagagagagagcaagaatcattcatggtacattaaaatggagcctgaatggccaatgagtctgctaacaacacaatacttgttaatcttctttcatctaagaagcaagaaacaaaggaattccaaagcgtagactatgtgagggaactttttctgactcccaatgaatgtgtcttacagttctcaaaatgcagactaaagtaaacttgggcctttctttattcagaggctttgctgagaagagagttagattttcagtaaagcttttcctaaaacatttggatatactttttgagtccagggatgttggagacagtaggaactttgagtcttgaaaatcggaattttaaacaaaggccagaaagaatagtgtctattttaaaggcctcttgttccttccgtaaccaagcaaatgcaaggtaatcttaattctgcttcttgtaaatacggcttgcttgatctcattttacaactcactagtttgcattttatacttgatttgtgtgatttcctgtgatattaagcagatgaattcccagccctttgaagccagtttccacgtagaatttttttgtgtgtttgagatctatgctgtggcctgcctgaactcatggaaaactggcgatcctggaagggaattgttgtagctaagcttccccaatggcgcttttaaaaaacagcagtggaaaaaataacagggcgttagtcagatgtgacgcttggcagacacttcactcggcctgccagggcatccccagaaattacaaaccctcaaaggtgttcagggcacagtaaatgaaacacgccacagtttctttatgcccaccccattgattggatcctcccccctgcaagttcttagcaacatggattttgatctgagtgaaaggtcagctttgaagtaagtgtaaagttatttacaggaaatgaagcagaaagtgggctctcatgcatttttaaatgtccccattatcaggagaaaatgaactgtgtcatcggtcagaggaaaaccaaatccctacgttttcttgtgtgaaagttaaataagtagtccagaagtagcccatcaactctgaaattttaaacttcaccagggtctgttttcacccagctttggatgtaaaagctgggaacagcactgtgaactaaatctcttcagtaaacaggcaggagtgcagtgggtgttgggaggaacacaggagggttccttccaggcagagatgctaactagaccttactgataacaacagcaccagcaacatctttagatatttaatttctagtcacttgctagctgacctgtgttggtgtatgcattgcacatacacatgtaactgtatctgtcagagggatgtggtgaattagggcaatcacggggctccttcagcaaggaaaaaggaggagggatctgaaggtgaggaaaagggaaagcatggcttgccttacagattcacacttaggtatggctaggacatctttaaaagatgtgtctgtctgtgagtccttgacttcttcctatgttaggtgagaaaactgactctgagatgagtttagatgccacagatgagtgagttcagtgatgccttggtcccacattggttctcattttataagattagttacaaaaatttagtgcagttgtaattcaaaaatctattaaagctactatgactggactccgcggctgtggttctctttagtgtagccagatagtgtgtggctgttgctggtattgttaaaattgttcccctgttctaagtccaaagaaagaacccatggctaaaggacagcacaaaacctctttagcacacctttaatcccagaattgggtatgggatgtgcagaagcgggtgggtctctgtgagtttgaggccagcctggtctacatggtgagttcagctagagcttcatggtgagaccctgtcttgaaaaaaacaaaaaacaaaacaacaacaacaacaaaacacctcttaatcattgcattgccttaactccactggggccgtttgcttccaggaggatctaagaagatagatatgtttgtggccaaaaggccttgtatgcatgaagacctggatttgatctccagcatcctgtagcttgggcatggtaacactgtaatgctgtagtgggaggcagaagcaagaggataagaggttaaaggtcattctctgctgtgtacagccgagggcatatgcagtctcagatacatgaaagtctacaaacaaatggctcagacatcacaggcaggtgattccccaggacactgtggcagacaaggccagggaaatgccatttccattcaagcactggggtcagaaagccctgaatcacagtcatagaccacacctctcacttgctccccctcagtcctgggtatgaaacttagaaacccatgttgccaaaagcatgacttctctgattcagggcaggttcgggactgaagaactcagcagagagtgcctcctccagggttaggaaaagagcaaggcaatttataagggggggggggaagccacagggattatgaacagagcttccctttaattaagcacactttgttatctcctgcttttcagctatatttctgttcttagcatgaaaacatagtaaaatcttgatcacagtttttaaaagctaaaaaataaaacaagtagaaaaagagctcacccagtaactaagaaaacaaacatcactaagtctctatcccctcctctcaaagtgtggtgataactcataggcatagatgtaaggataagatcaaataaagtgtataattttcagtgtatatttgccattgtataagtgcccaccactaattaactagatagcctagtgacctccaaagctaatggctgcagaagtctaaaactcaactaaaaagaatgcttgctgttgattcttctaatacctgagtggcagaggaggaaatagcagtcagtggtatttatgactttccatagtaaccatttctatttaccccgcctcatgagaggaaatatagacaatcctggctgggttagtagcacctgccattcacaagaacataggactaaaatgtatatgctataaagtaattaaacatgtcaaatataatttgaggggactaagtatagattaatttacacatagtaaattggggggtcataatatttgcacaagagtttggctgatttcaatatatagtaagcatgatttttcaaagcaatttaatacttctagaatcaggcttgagagatggctcagccattaaaggctaggcccacaaccaaaaataaatatttctagaatcttaaagtattcattgatattctatcaggagaactttcgaagtgagacatgggctgcattgccttaattcaattcattcaacgaagatgtgtacagcatttttttatgggccaaagatcaatgttatttttccatgggatgaaacatttcacttactccaaatgtcacttaggcacttgtttgctaatctattgtttagtgtgatcattgtaaagtgaatgtatgggtcttcaaaagatgttgagttaatgaataaaaaagaaataaaaaaggaaaggacatgactgcccctaggtatggtggaggagaaggtttagtgtagatgtgtgggagagcatagccagaggcaggaatggacgagagaatccacggtgggcaccctgagccatgtgaggagaagtgggagaggaagggaggggaaccaggtgcagctggaggcccaaaaaagagcgggcaaccaaaatatctgaattctataaggaagggcagttgggggaagggcagcccagcgcctgggctggagaagagggtaagggtatggtgtgctgcatccataccctgcagcaggtagagactggggaatgctgggagatcctgggggccaggtctgctctgacatgttaaatactcacttcatcactttgtccagggtctgaaacctaacactgaggaagccccaatgctacaagctggtgggcctgagagtggaagccatgtctttcagtctctaacccatgtgtgaacaaggaaggtcaaatgtgctccaatcatgagaagagtggtgtgagtgggggttccaacagacaaataaggagataaactgggacctggttgctcaaggcatgatctgtgggccagcagtttggaagctctctgagtgctttagaaacagactagctagctccccccacacctgctgaaggaggcctctggtcaagcagccctccaggtggcctgcataatgactctgtaagctctgagctacagctgatgtcatgggatggtgtctgttgtcttcctcttcttggcctcctctaatgcaaatggctggcactgctctcagggtggatgctgccagtggaaacacggggcccctaagatgggaagtcagcaagaacagccgaccgaaaaaggaagtttatattgaggaaggtttggtctgcttttatagcccctggaggaggaatagcactccacagaagctgttaatgatgggctggatttgaaggcagtggtcggtgccaagctccaaatgtgttgttactctaaaccttccctccagacgccttgttacacttcggagttttcaacgggtaagatccacttgcaaatggctggttacataaatatagtcaaagtgcatccacattaaccttattttcaacttcttttagtaatttcattaactttcactgggcagcaaattgtttggcagtgattggaaatgtctagttgaccttgatagagagattttagcagtgattgctctgtttaacagttcgcacaggtaactatggcaactctccatctcagctaggaacattccatgcaaaccccacatgacaacaatgccagcctatcaggcccctttagtaagtaacccaacaatagtggacgattcaacctacagaaaagactttctgttcacagggaagtcaccaaaatggcacttcacagggagatctatggccttaacatacaggctggcctgttagcataatttctgtgtactgttgaaaaaccctcacctttccactttgaacagacaaagagaaaccaagtgccaccatttagacagttttgcctagcagcacgttttacctgccagggctagctgcataaaagtgtaaataaatggtggttatagtccccactttgcagacaggcacactgaatcagcaagactaggacacagcactgtgcgagtggccacagttatcaagtctgccatgactagcttgctatactgctccagccttttttcttcgattcaccttctgctaacatgggaaacctttgtcctcacatactgtgccaagctcagctgcttctcagcaacttctcagcctccacaaaaggttcacatggtgattaggtctggtcatctctctaccaatctcatcctatggtataaaaacctgacacctgtaaccccatctcattgatgctcacagggcccagtgcctgcactcctttgtgagtttgctggtgtccaaccttgactctgatctactcttcatctcatctctcgtattggaatctctcaggctctcctggaatggcatcctttccatggaggttcttccaaatgcacagactcagttgcttcctcaaacactggcggttacgacttgactgcaatgctggttatactctgaattgcatcatcgtgagaccccagctcttaggggaggaaccatgtctgtgctgcactcttccactgcatccagggtgcctgcccacaagacgtgctccatagtatttagtgagaattccattttcagcacccacactgggtttatacccatcggtgactccagctctaggagaccaggcaccccctccagcccccacaggccactgaacttacatgcaaacccacagagacacacatatatgcagaattttaaaatcttttaaatgttcttgtcatctgacccctgacagagtgtagtccctttccttagcaaacaagaggcattggttccttccctcccaagacagaggtaccagactccacagaagcccaagtccctcagacaaaatgggcatggcatttgcatgtcacttgtgcataacctctgtgcaacctcctgtacattttgtcatccctagattgcttatgtgtaccacagtgacaatgctatgtaaaccatactatgctgatgtgggtttgggtttctattgctgggaagagacaccatggccacagcaactcttataaagaaaacatttaattgaggggcctcactaacagcttcagaggttcagtccattatcatcatgacaggagcataatgtcatgcaggaagacatgatactggagctgagagtgctatatcttgcaggcaaaaggaagtcaactgactgtcacactgagggaagcttgagcaaaagagacctcaaagcctgtccgacaatgacacacttccttcaacaaggtcacacctcctaatagtgccactctctttgggggccattttctttcaaaccacaacagctgattaggaaataagcacactaaaagtctgggcatgttcaatacagatggtaaagtttttcaagtattttcttttctttcttgtttttatgatttttttttttgagacagggtttttctgtgtagtcctggctgtcctggatctagctctatagaccaggagggcctcagacttagagatctgcctgcctctgtctcccaaattctggaattaaagtcctgctccaccacacctggctctcaagtattttcagttaaagattggttgcatcagcagagttagaaccctcccagttggaaaagcaaactgcttatttgctgttgtccctttagctgctgtgatttttatattgcaaatatcatactttcaactttttattccttgttttgtttgtctgttttttgagatagggtttaatctgtattgtttgggggtctgtcctggaactttctctgtagaccaggctggccttgaactcacagaggtctatctgcctctgcctcaagtgctgggattaaaggtatgagccaccagtgcctggcaactttttcactctgagacagagcctcaatatgtagcccaggctggtttggtattgaatcaccaaatactgcagctggcattaaatttacagtaatcctcctgtctcagcctcccaacagctgggatcactgtcatgaaccatgaggcctgggttagtttatctttgcaactggaccctacaacctaggagcacagattcagtgctttaggcattcccagaaggaaccccgaacaccacagacctcaggagtcagcatgccaacagagggatggctccttcagctgtccggtgggaactttggaatctacattcacactgtgatatgaattggaagtccctataggctaggagccaccaggcatttggccttactctaagtctgtcttcagggaagttacaactaggacctaagtcctttgattctcagaaagtgggtatcccttaaaatgtcctttgacaagttttcttcttcagtctcaaggctagactcatgttcttggtgggtctaatgtggtacaagaagccattttgggctatgtataggtaagggaagaagagactgttaaggtcctcattatatacctctctctctctctctctctctctctctctctctctctctctctctctgtaggacctttacacgatgcctcaagtttcagcattagtaacttgcagacagctgctggaggtcataaatatcacaaactattcctgatgcacagagcaggctaagagcctccgtgcactttagcttttttaatgtgtgtgacagcacagcacaggttcgatagacctccctcaaacttgcagacatgacctggaaagtggatacactggtctaattagggttggagctttccccagtcacagccactcatcatgctagggccctcatcttttgttctgttccttcccttaatgcccagaaggcagatttggaaatggtaagatggcttttacactcactctccatagtaagctgatccttcacttaatggtcaccatatacaaggttgggggctttcacttgaataatcatgtagtctgtctggatctgtccctgctcctctgtttagttgcttccctgactctgtatgaagagtaaacttttagggccatttaatggaaactcattatgcctctttagcaaagctagtgagaccatctcctcctaagtggtagcttaatggcctcaagcattaataaaataaggggatggggctggtgtgaaagtgaatgaaaggtgccagttgatacccacatcacctgttcttccaggaactagagaagggaaagaagcccaagtctgagagtttctgagaaagctgcatctgcaattgacactttagtgacttccaattcatggggagccttgcaaagcatttctggtgcttcatgaccttctacgacctgtggccttccacccctctttgtttatgcttctaccagtgtaagtgcatacatgtatgctcgcactcnnnnnnnnnnttccctttccttctcctccccccccacttcctttttgaatttgtacaagaatggtgatggtaaggagaacggaaatggagtcttgtgtctgggggattttcactcttgaatgttttgtcccaaatcctatctcagtatacatttaaaacaactcaacaatatttgctgagtaaagtaggtattatgagtaacatttacagatgaacaacctggggctgattccctaagagataatgacaaagccaagatgggactttccttccactcttgtgaggcaagtcttctatgtggagtccattatggcataattactccttcgaaccctcctccttcaaaccaaggacagagatgggcctgtctccccatcctagctcagtgtccaacacaggaatattgggactggaagatgggaaggtgcatacttgaagcttggatagggaagaaatcagtggcctgcagaatcatagcagtcacatctgaattgtgacacttgatgaggttactcctaacctgtgtctgcctgtgaggcttgtgatagtccccacctcttctccagctctgcacactgttcctcaacccagataagtctcttgttcaaaaatgtcccaatgacacttccttacttgccctttaccacctagtggttccagagagaatcctgagtcatgctttcaagccttattatggaccaagctctagaaatgacatgatatcagaattcagtcttccctctgcaggatagaagtcacgagcacatatgagatacttcatttggtcacaagactgtgaaggtagaatatttaaaatgtcccagccaagtgttaattctactccttgttcacagagcatgctaaactcttactagatagcaggaagtgtgtgaggtattgagggcaccaggagcatgcagaccaggaggacctcagtccagtgcagagactggaaggcacatggtcaccaggaaaagactttcagtttcttccgagcacagtatcattcaggtaaactctcttggtgcctttgagagatgcagctgtccctgcctcatggggagtctgggaagctgaggataactactgtgactgacatggagagagagaatgcagggagggtttacttccagccatgaggtcagtcagaaagcatgagagtcagaaatgggcatctcaccatcttggacatcaaaatcttccttgattgtccttgtgcacaagtgtgtccaggaatagaaggcaagctccttagcagtgagtgattttgaaaggatgaattcagctagcatgtgggtcagctcaggtctctgagtgacctcattcagaaattctctctcatcactccagtcaggcaagtgagtagccataggacctgctgtgccagctgtggtgccatggtgggtctcagtatgcataatgcaggtctgaagctctggtttcctgccctggctgaggtggctcacatttcactgatgcgggctttctgagtgtgacgctgagtgtacaaagaacagaatacctgaccgtgctcctcctagctggaacctgtgtgctttgccttggttctgtgcagaatcccaatttgctgtcttggatttcacagagtccttgtgagaaatcaagcctacagaagtggtggtttactgcagtctgggggatagggttcttaggactgaatgcttctattttctttgcaaaaaagcccaaactcacacctatcaatccacaagggcctgcgtttgcctacactttttctcatgcaactctcttctgtgtcttgtttgcgtctctcccttctcaagctgcttccagaaactgaggatgctcaggtagagttaagcattgcctgcagagccacagagatctggagaggaagagtagaaactcgtgggttttcttcctctttagtagagtgacgtcttagaatgcagggagatgtggaagtcagagggcaaagcaaggctgtgcttcatgtctgtagaaatgctgtgctggctcaggtgacccccagggcagtagtttctgcacatggaccactttcaagtcagttaaatgctttgcagatgtgaatataaactgagcacaaagtgaagggtgcctcagtttcctttctttcttctgcagtcttttctgaagaatacctcagtgtgtgaagtagaggcctccatcataattacatcctggatgagcacattatgattaacaagacagtacgtacagaagctgacaattagacttgaaataagacaaaagataagtcagtgcttctttggaacatttccacaggaattttcatacaacaacatacctacatgtgtgtctgctagatacttttaccacccagctagcattataccaagactttccttcccattaataaaagaatcctgttcatggcctgccttatagcagagagaacaatttcaaattgacagagtattgaacattccctatgtatcatcagaaatatactgcaagcattctggtgtccctagaagtctgctcatttctggtcaaaatctgagaccactgaggttccttccatgcttgagggatatgaccctctcattgtctgggagcaatttgggaaggcaggctctcccaggacaccaaagaggatttgggatctccactaagctagtggagagggagctgcgctctgggtccagtgtgacacagagatgctggaacctttcttgtacttgctccttacagaaactggtctgaggtccaggttggcatccatactctccttccttctcagatcaccttcaaatgactcctgccacctcccagggaacatcctttcccatcttctcccagatcatgggttctaaaccacagcatcagtgctagagcagatgaggagagggaaagcccctggagcaattcagagacaagaaggaaggtagtgtgaacgctttgtagttagttttcaccagcccttccatttctctgttggtctctgaggatcctgatcctctaggtcagtgatttccaaacctcactgatcactgtcacccagggacactttaaatatccgtgttctgtgtccccacttggcgggcattctaattctgagggctacaaaaaggcaggagtggagacaaagaaaggaagggaaaggagctgaaaattgctcacttgggcatcttgcttcacagccttccacaaatgtgatttattttttattattcattacaaagagttaatgatataattatccaaaagcaattagatgcaggatgaaaacaaagtgcttaaggggccttgaggcaggcttgttgaaactgagactggaggagtcagatatctccgtggtggactctgcagggacctgagcttccggcttcacaccaaaacaggggagaaggaagtctgtgtcagggactggtgcaggtcctttcttctccatcttccatctggtctttaaggtctacacagacaccaccatctccatctctggttccactgggctgcagtgtcctcagagcaaatgtgtcagtctttttggaaaatggggacagtttatgtttgctaggcagtgttctacgcagcagagactccatggtgagtgcattcaggagttctgtgtgttctgaaggaacttgtgttcttggcgggaactaatagataactaatagataagtaacgctgttacaggttataatggactcgaaggaacacacaaggtcctggaacagagacgagagtgtgttggaatacacgagtaattttcagcaaagggggtccacttagagaacgaaccaactggactaggcatgctggtagttacctgtaatcccagcactgtgggggtcctgaggcaggtggttgtgagttcaaggcaagctcggtggagctcagtcaaaacaaatcaagtaaacaacaaaatcaagaaagagccctctgtcctctagtacctgacttgctttgactctgagtctagcttatataactggttggtctgagaatttagcaagtgactgactcaaaactgtgcaactgagctaccagcagtatgttggcagactgcgttctttctggtggatttgggagggcatctgtccctgggtctcttcctgctctcccaggctgctgccattcttggcttctatccctgcttatcttttcaaatcagcacaactcactctgtctctcctgcatcccatctaaggacttttggattatattagttccacccagataaaccgggacagccacctcctttggagagcctaccccagccacacctgcagttccttctgctggttaagacatcatcttcacacagccaaggatttaggcagggatcattatgatgggagcatttctgtcttttacttttattttttactttttttatcttttaagactggattccctaaggcccagactcaagatctctctgcttcagccctcaagtgcccatcatacctagcctagaaaatactatttcctcctgactcacacagcagaacagttgtgagtcagtgtggtaacaggaatgaaagtagtttgttaaggtagaaaagaaggacaggagggacaacttagcagtaaagagcacattctgctcttgcagaaaacccaagttcagtctccagcacccatatcagacagctcacacttcctgtgcctccacctccatgggatttgaggtcttcttctggtctcctctagcacctgcatgcatgtccacatgctgccacagagacaagcacaactgcacacaattaaaagttaatctttttaaagttactagagtgataatgagttctgtaattctttaagtgtggagaaactattagagatgaaaggcaaaactaatggaggtaatgtttcacctggaggaggaaaatcagaaaatcaattcttttgctctgcttgaccatacagaaatatggggaaaaaaacacacacacatcacacatacttatctccagacaggaacatgtgagaagaagggcatttgactgcacctccccttgacctcatcatttcaagcccacatcaggactcaaacactgtctctacgagttgtgtgttaattgtaagcacaccccctgcaccattttcttttcaggcttcacatgtcttcctcaggaccgcaagccttccttccttctttccttccttccttcctccctccctccctcccttcctccatccctccttttcttccttccttctttccttcctttctctctctctttttcttgttttattttttttccagacagggtttctccatgtagcattggccatcctggaactctctctgtacactgtacaccaggctggtcttgaacccagagatctgcctgtgtctgctcccaagtgctgggattaaaggcatgggccacaatgcctggttaacaactttttcttaaggaattatttcatattctaagttcggagcttaaagctggagaagtcagcctttgctctcctgaagcatgtggtctagcgtgctctccttagagccttgattgttcgcagccttttcaatcacactgggtcaccttctcctgaattcaaggatcctatataactcaagtctacatctgttatgacacagagtctaacaattctaggtttcacagatgttggttggattaagcagagtggcagttcttagccattaaagttatttcttggcataatgagggtagcatagaagcctttcatctgtaggaatttcagaagacagtgggagtctgtctgggatggatggagttacctggcaaaaggtggcagacatcctaggctaaactactccttaggtcttgtccagactccttattataactacagttgctccttgatcacagagtttattcgtttttggttaaagataatcctgggcagtggggtgtggtaggactctggaagatttcagagcatttttattctaaggctctcagtttctggtaagtgaagggtgatgccttgtcgaggaatgatgagacagacatgaccgctgcttctttacatgtgttagtttcagtgcacacctgcactctccttcctcagctgagacacttgctgaagatgtttcagcagtataacacactctggggcatcactaagtccatggccaggccatgaaaactgcccaatcaaggaacttgcaatgctagccttgaatgcattcctcaccaatgctccttttctcctcattttctctgaactctcttccctttggaatgtcctactctcacatcttgttgtacttaaagcttatcctaaattgttcagatgtgatctcatccataaaggttaggccttaccctttgggtccaatccagctcattcagatacctcaatgaacggtcatcagttcaatccatctctaactattattctcattaacagcttgctgacatatttgttcttgcctgcttgttgttttaatgtgttttcttttattcctctgtttctcctagggacaccacagtactttacacttagtaggcaccccatatacccttgttgagcagctccattgattacctgaaatctgaaacctctttctctttgccatacatagggaccagtaccacaccccactgagcagaatgcagtcaaactagaggagccagtcacttggtaaagctatttggaaacctgttgtatttttccaccttcccccctcccaatcctacagattctgagggttcagtgccatatgtccccatggctgaacaccagaaagcttaacagttgagcacaaaacctgtctccaaatcacacacaagccaagacctcctacttgccatgttgatagggcagtagggaacacagaaaaggtacactgtgctatgggctggctggcagggtcctgctccagttcaggggaggctgaatcaatcagaattgtgttttggcaatatggttcttnnnnnnnnnncctgccatctctgacttttcatcccaggagggtggcatatgcagcatcttgagtgcctacaggaacctacccagtcagaagaggtacgctcatatagtgagagtctgaccaggaataaaaagcgtgtgaatacaggcagatgtccttgctcactcttatagcagcacaaagagaggcagaaagcactgtcagcctccagtgagaaaaagcaagtgctgtttctagctgctgatgccactcggctgcctagaaacaacattggaagccataaggaaccttagtgtctaattctggcttgttggggtggggagagaatgagccaccaacctttgcgagaatgagcatcgctgcccagggtctaagcattatggtttcctgatgctgcccatcgggtttgtcagtttcttcacagtcctctacaaatgctgtgccagtagacactggaactctgggttggaagcctgatccattccatctctccaggccctcagcttttgcaacctgaaaggcttgtagccaccctctttgcaggctggtatcagcttccatatcccagcttcagagaaggctttcctgaacataccactaaacttagcaacctcgtctgtgtacatctccaagaattgatcacttgtaggaatttttgtattcatccatgtcctatccaactagatggcaataactcatcagatgccacaactctgtcttgtttatgagaacaaaaatctcttctccatagggtagaccctaatacatagatactctgtgtctgtaggaggcttgtgatggccacatttcacggaggtagcatggccatctagttagagtgtttcaagaatgcatgtagcctctctgagtataatgcctgctgtgacctacagcccaggggccccctcctgcctctccatccccagtcagaacttcaccagaggccttgagttttgcataatgctgtgtgcttctgcctttcttacacttggatctcacctctcctgcctgccccacccccactcccatttacttctctgttgttcaagatcacagtcactggctccgtattgttctagtgtgcttatgccttgtcaagtcagctgagagatgggacctgaccccttgtcttctgataaggacactgaatgagacacttatacctgccatttagctggcccccaggagaatctagtacagacaagaacaaacatggtcaaaactccagtattcttaacccccttccgttgcaggaacctttctatttcggaaactctagatgttgcttctttatctctaggaatatctggggctttcccccctaaggccccctccaccctgaaaagacaggaagctgatgcttgctgcagggcagggggtcatgatcctcagtggcatggccactggtgagatgttcttgtcaagtgaatatgccctctgcccatgttcatgcaggcaaacctgattaaatgtggtgaccatgtaaacaaatggaaaaaggtgcagacccaggaggagttgctgggaagaaaagagggtcccatggtaggggagagaggataacagaacatgatcaaagtacattatatgtgtgagtataaatagaccttttccatcaactcaggcaacaagagaagtcatgaggtgttgtgagggtgtgaagtgataagtggagagagcactgagaggcagactcactgagaggcagactcacgagagcggaagtgtcttgttgatgtgagtggatcaccttgaaacaggttctgggtagggagagaaggggaatgaggcaaagatgaaggtggacgaggactccagatgacaagaggttaaaaacatgagtactagccaagactgcaaacagaggtctctgtctgggcaatcattcgccccatggttaattctgaacagtcaaagagtgatctgctatgagtgtgttctctttatttcatttattttttcaaacattacaactctggagatgttctgttaatttcctagatcaggatttcatcaatttttttggtttttaagatttgtcagtatatccgaggccagactggtcttcacagtgagttctaagacagccaggactacatagagaaacactgttttaaaaaaataaacaaaaacaaagccaaaaaaccttatcaatagtttgtgagtgtttgcctgcatgtatgtgcaccatgtgtttgcctgggcctgtgaaggccagaaaagtgtatcagatccccagaaaatggagttacagatagtcttgagccaccatgtgagtgctgaaaaccaaacccaggtcctctgcaaaagaagccagaacccttaggcactgaaccaactcttcagccccagccaattcttttttatttttacttcttccaggaggtgttcccaaccacaccacggaatgaatggagagttgtgttcacttgcacaggtgctctcattggcttccagtgggtttaagtcctcctacaatttataaatgtctaataccacagcaccattggagagccatcttgatgcagaggacctttcactccccagaaaccagacactctgaatttaatcctgctggttttcatcttctcctaactatttcaaatgcaaacttcccgacaaacacattctttaattcaggcaacagggatggttggggtggggtaggaggtggggtgggacacattaggaactcatcctagatgccccctgcacctgaatgactcagtctaaaatggtattagagctttgcagcaaacccacttcaggaaagctggagggagattaaacaaaagttaagctgaaggggaaataattttatcagaattagggtttttacatgatatagtgaaagtctcatagtaaataagctgtcttcttatgggcttaggtgcgcaaggaataattttaaaaaacagattcaaagtaactagtacccaaaaatccagcaatgtaggtggcagaactcttgttgtgtaaggttttgcttggaacagcacaattaaacatgagcacctcttgcttgtcatgaagaggtgaggaagcacatgtctttttctttttcctttaaggaactttccactgtgctccagttctttttctttttctttttttccctccttgttcatcttcccagaaaccccatgcttcattttgcactgcaaaaaggcaagcaagattcagactgttcataacagagcacaaacacagttctgcgtttttatgtgttgctgtctgattttccatgacacagaatggggccacagtgactagcatagcgcttgctttccctcagctgacaaacccgcagaggactgtgacagcatcttcctcagcagctgaccccactggctctgacacttttgctcttggctcttcttttcttttcgttctaagaacactttccattagacccaggatgcgccttctgttaccaaaaacgatgagtcagaccaacgttgggatctatagctggctgttctctcagtctgctaagattacagaaggaagggctgacgagtgctcagacacgtgacaaagggggtgaggcagcaacctgaaggtcagagctccctgatgcctgggaagtaggatcaggccagggacagatgtttcagctgcttccctcaggttctggggtccctcacccactccccccatcatactctctacccctgagagtgttaattgtcaagtctacatgtgcctcggagcatgcttacagggggattatcttatgggtgggaacatttccagagcagggaatcatgggctgaataaagcagaagtaaacacgaatgcatctgtctctctctgcttcatgattgcagatgcaatgttaacagcggcttgaagtcctgctgcccctacacgtccctcccacccccgtcatgacgtactgtaccttctggttgctttttgaaagtgtattttaacacacagcagaaggagtgaaaaagctaagacatggtctttatccagtaggctgtgatggtctcgatacaatactctgttgagattagagggaaaatgatatttgagggaaaacaagagcacacctgacaaactcaactctttggtccagctggaaagcaaagggggggggggtgaaggcagactacagtgccaaagactagagggttcaaggacactttctgaagaaggctgattcaggtccccacagcgccccatcccacgtgctgagttctaagtagaagccaggtcttcatgcccacatctggaaatgcctgagctctgtttccctttttttgttccctttaggcaaggttaagtcccagttcgggttacctacatggcttctgtgcggctagttttaaatgtcaatttgctatacactagaatcttctgagaggaaaaccttgattaagaacttgcctaaatcagattgcctgtggccatatctgtgggtaactgtcttggccacctgccgacgggtagtcctgaactataagaaagctgagtataagccagttagcaggcaggatccttcatggttcttgtccctctctaactgtgagctgaattctttcattgaaggtaatgctgtgtagaataacaagcaggcttgtcttcaaatccctgtcttgactttcctcaggagtgaactgtcacctggaattaggaattgactgaacccttctgtaccctaagttgttttgggatctccacagcagaaatgtaaggacaggtcattgttaggaataaagcttaatgggctgggggcgtttgtggcaggaccaaggtcagttgtgcagcagtggtcctgcagcatgtctacaggcagatgggaagactcctatcgaaactttattgagggggaagtaagaaaataagggaaggaaagacaagagaggtaaagagacacagagacagagagaggacagaagagaagagggagacaggaaaagtcctgtctgcccttcaggggaacacagagagaagagaagtgggtggggttttcttacaaagggtttttgcccctccatgcagactactagccatgggacactgggctgaccagggtactgcctgagtgcattctgccagctatcaggggaaggccagcataatgcctgaatccttacagtcatagcacagaagtttctgtaatatgtaaagagtaccccagccaatagaagcatccatgaatacctttccataaaaaaaaaaaccttactgacataatttcattaatcttttccaacaaactgatgcttctcttttaccttccacatagagatgtttgtctcacaaacagcattcgtaagtactccagtcacagaaccctgtgataggccactgttgatagaggaactttaaggaacaaaagaaagaaaacctaaccttgtgatggacatatcagaaaaacagcgtaagaaattagctttttctccccaacagaagagtgtggctagaaagctaagatctcccctcagcctcctgaaagattttgtgtgagcagttcctacgctaaagctagtgggcctagagagctgtgggctctgaattcagagaataatgttttcctgtgaaaatcaaacacatctattctctttcaaagctgtttctttaattatggaggagatggccagcacacgaggcagtgtcattctcaagtacctagaggtgacacgcatgcagcatcgtgcttaaaggatcctcacattcaacatcttttcatgtgcccaccaatgaagatgcaccatttccttttcagcgttcggtctcggtgactcggtggcagctttttcagctgccacagctggaaaactctagtgaattccaaaccgtgattagagaaatcagagcagagttaaaagaagtcaaacaatgggagggagggagggagtaagggagagagggaggaatgcactgtgtgcacacagacaagtcacatacaaagataaatcgcgtctgcccgtgaccatattggcacctgtcataaagctatgaatttgctaggaatgggtaaaggtcatatggagaaaaaaattctctttctattaccaaaggcagtgaagaaaaaggcacctgtggcactcgctcttgggggtggggggaataatgttactaaatgatattggaagcttaaaaatatgaaaagcaagaactgaaatgatatgtaatatctaggtgagctcagataatggagagtggtctgaattgaggcagagatggatcaaggattgtcaaattgttccctccctctggctgtatatctttttgagttcagactatgttttctttgatggagaaaatgataggtttgaaaatacacgttgataggcatccacagatcaagcccccctagtctttctgattcaggggcataaaactgtcaggtcaaaagcaattcccatatgcgaccttaatttaacaaatgattagacccaatcctggtgctttgaagtgtctttggttgtcatgatccaagcatgatattattttaaacaggtttttctcatccctaggtttctgaaagggtatatgctgcaggaatttttcactcaagtcacccataatatctatctctttttaatgttcccctggggtggatttttgttctctaaacagtattttcccatatgcttttactcatttaggaataaagcctgaccaaaaacaatgcctgagcttaggacccatctctctgggtgcctgtgtctcacagtttggcttcttacacatctcttctgcgtggaatgggtgttcaaatccttgttgctaatgctgacacacttttcctcaccccagagccaggcaaactccttgccttccacttagaatctgaaggagggattgcagcctctattgtccttattgtgctagaaagaggtaaggctggggccagggggagaaggagagtgagatcaagggagaggattaagcagggtgatagcatccgtgattcaaacattttaactgtttatctccaaaatgccaagtcgtgtgctttaaaaaagaatggccaggcagcatcctccctgttgtgctctctgctgtaaagcttttagggaggagctgcggcctccagttctctctttaacatgtgaccatttggcttaagcccccaaccactgtcaaatgtgcacacattacacaggagttggccttgccacagatgacccagcaccattggaggagagtgctcacatcttccttgacattttctgttgctcatctcctccacctatccctgccctcctcactcattaagtcttcatgcccctggggttcagctccattcctttctcttctgtttgtcatctgctagcagtcaaaccttcactgagcacataggagtctttctactcgatttatcaagaacccaaggctctctcctaattacccatcctgaatatttagccagcaaagggatatagccacttccacaccctacaaacctctcatattccacatgtccgaacttgaacccatcatttgcctggctgccacccactgtagtcatgaaacacaatcctctcctgcattccttttctcagtgaatgagtccaatttctatctgggcactaatcctctctctcttctctccttctttccctgcttctcttcccttttccaacacacacacacacacacacacacacacacacacacacacacttctgacatgtaattaaccatacatttcattaggttcctagttgctatgtttgtccccatgggtggtggcatgtccactcatagtaatttagctcaaagctcattcttactatcttatggagcactgagatttcactggccttggggcttaagatatcccatctctggcacgcacagagagaatctgtccatgagaggcgctgtctaaaatatacagcaaaccatgtcactgccctgctgaaaacctctggtcatgcttcttcacatggtctctaagccaataagatctcccctgactcttcctgagctcactcctcacactgtcttgctggcctgccctgttcacagctttgttggtgttgtacaatccctgaaggccttgtgtttcccaggaaataactcccttgaagaaagcagaagttttccccagtgaatatatctggtaaaaagcatgggctttcaaagaattgaggtcagaatctcattctctctctctctctctctctctctctctctctctctctctctctctctctctctctctctttttttttttttttatgcttcannnnnnnnnntgtgtgtgtgtgtgtgtgtgtgtgtgtgtgtgtgtgtgtgtgtgcatgtgcctgcaccctcatgcaggtcacacactgtggggtagtggtacatatgcatatgagtgcctgtgcatgtggaggacaaggaaaccctctgtgtaattcctcaggtgctgaccactttgtttcctgaggcagagtctcactgatccagaccttttagttaaacagggctgtttccctttctgtagtgctggagttagtagcttgtattcccacaccccactttttcacataggtgctgaaaattgaactcagtcctcatgctcacagagtgaggactttgcttaccgaaacaccttcccaacccctgaaaaacttttagtaggatcatacattttcatcaataaaatgtatagatttctcaaggttgtcataatgaacttatagtcacaatagaagttggtgttaccaggagatttctatgtgtcaaagggtatttatggactttatacatatttatttaattctgcattaattttgtgataaatatgttatttttgtccctttttggagagagtaggatttaacctaggacatcaggcatgctggtcaaactttctcatggatctgtatgtgccagcctttgaattttaaagatgagaaaaatcaatgtacaaaagtatgagcccttgccttaggttgtgctattgataagggagccaggcttctgtgaaacatctagaaagtgccttctgttgactgtcattctactaataacactatatgctcctcatcttttcctctgcccactcaacactcgctcatccaaaccctgatggacacccaaaaggctaaatacagataatagctgaatggcaacgttaggaaaaaccaaagtgtttcccccagtctcgtcacaaaattctttggacaccagatgtgtggggtttttccacacacaccaactgtgttagtctctttttcattacagtaataaaacactcaaggctgggtaatgtagaaagaaaagaagctcattcaactcacttttggaggctgaaagtccaaggtcaagtggccccattctttggcttcccaagagggactcatgactagggccccacgtgagagtgtgcgcagagctgatcacatggaactcagcaagcaggaaaggtccagctttctctttctatcacaaccctcccccaggattacccaggagaactacattcatctcctccgaaggcagaagcccattgacctaattattataggtcaagccccacctgttaagtgtatagtgttccattacctcttaacactacagcttaggtaccaaacttccaacccatgaatccttagggcataaccatgggaacatccaaatctcctcttggagacaataccagacaccacaggataagggctcatacccacagactatctctaacctcagatgccagtcacaaggctgaagccatgtcctaggtttggaggtaaccaatgcattatagaggcagttaccaggggtgctgatacacaagctggaggggagttctcaggaagagggaaggaaaagaccctggccttcattggacatgccaacctgtaggggtccccatcagctgcttgaatgctctccaaaccctggctgtccaggtcttatgaacacgtcattatgaacatggaatttagtaaataattatccatttgtgctcaaacaagcaggcagcccctcccctcttcatggaggtttggcagggatcagctagctgtgtcttatcatattacagtatcacatttacatctattaatattttattatttgccacaatctgaattttaaattttatagacattttcacatttgagtgtcagtacatttactgagttgaaaattttatctccttataaagagggggaactgaggcagagaaggaataattatagtacatggtgttgcctatcttgtaaacaaagccttgagtcccttagcttgtgctctgaattgctataataaattgcctccgaaggcattactaggcacaaaatgatacttttaatctttactggaatacttaaaaaggcattatagcaagcataactacaagatcattaaggaaagccaaacattgatagagtggctgaaaaaacggaaccatgaccatatgtatgctctgggagggagagggttttatttgcaatcttgtggtaggacattgtctgagtgtcaccatgtgcaggcccagataccctgctctgacactctccacctcattctcttgagacttgagacacggtctgtctctgatcctggagttcatgatgttttcgctcctctggcagtcaacaaatccagcactcgtcctgtctctgccctttatagcactatgttcacagacgtgcacagatatgcacagacacacctggccttttaatgtgtgttggggatttaacctcagatcttccttcatgcttgtgcaagctcccttccccatgggcatctcctcagcccaggagacgtgtattacactagggtcagatgacagcaaaccaaacacaccagtcaaaggacgctctgttctgatgaagggaacagacatagcagagatctagacagggctgggggcaatgagacattttatcctccaaaaatgtagccagtggatataatgttaattgaaaagtaggaaaatggaaaaatgtgtgttcttggtgtgggagcccatgtcccagtgacctctgtccttagttcacaaggtggcagatgctgtgcgtttatgtgttgggagtgtctcagtcctgcatagtgtctaaaggttaaatacaattaacagctaggggacttttaaggatcttaagattcctgagttgaagctgtccccctgatattaggcagcccaggcaacagtcaagagttttactttaagaaatggtgcagaatgaaggccaagggaatagcaagtgcatcctcatagcatgttcatcctcagaaaacacgagaaagtgctgtgccatactcttgtgtagagacagggttcgagaacacaagtgtgctctggggaacttcattcacccttacactcccagtttgctgctttcatggagaattggttccatgtttgcttgttaaaaagatttattttccaatataggtggtttttaaattgttttctttccccttcaaagctggcaacacatgaaaaactagaatcttccaggtagagaaatcacttccaccctgtccttaccagactgagcaggttcataatactgcaagccagtgttttaaagaatacttctactgaagtcagtgtctggccttcattgtctctctcccagggtcatttaaataaccaagaaacagttcccataaatgcatgacaaatattggagttttagtggaaaaagttttcatttcttagaaagctagggggcttttctatctgctcataggtctcattttctggtgtaggaggccttaatagcctgaagcacagattcggaatctttagtttatttgtttgtttcagctatagcagagtatctttgtaaatctcttcatgtttcataaacccaattaggattcccactcagatgtgtctttgatgtgaagatgaacatagactgtagaactgaggctctctgcagagctgctgtctgtgtggaccacacagttcctcacactgacatttagaacagggaaaacacatcaactgtctatactgcacctggatacagttgctagaagaaaaatatttctcccaaagtttcaaaagatgacgacatcaagtgccaagaacatcaaaggcacagtttggtgttcagggattttgccaaactaccctctaaatgctgcttaacattcccaagcgattgagttacagatgagcctgaccctgtagggacccctaaaaagctcttatcctgcctgtgtatctagatgattacacccaaaccagtttgaccattgcagtcctcagttgttcaagcatgatttccgtagaagttgcatttccagattgttcttttgctctgaggggagagtgggtggagatttgacctcaggccctccatggacacccatgtggagacgtggagacaacagaagtcctgttccatctctgctgtggtgcacagctcaaactcttgattaggaacgtccttctttcaaaacatcgtggaaaagtggggataatttggaaaataaaccaaaataaatgtgtgcttagctttttaaatttcatttatgctataaaaattttaatttgaatgtaattgttggcttatttgcatctttgttttagttgggagtagtttgttgcaaacggcaggaaccttttctttttttttctttcttttcttttttttaaagatttatttattgattatgtatatagagttctgcctgtattatgtatgtagtgtatgcctgcatgccaaaagagggcaccagatctcattgtagatggttgtaagccaccatgtggttgctgggaattgaactcaggaccttagaaagggcaatcaatgttcttaacctctgagccatttctccagcctgagcaggagtcttcttaaagtggttctggtgaattaatgataaaaggtgtgtgtgtgtgtgtgtgtgtgtgtgtgtgtgtgtgtgtgtgtgtgtgatcaagtattgaagagtaaatggtagggaacatcactgaagacccctgagcatcagaagctagtattagaacactggaggctctccctattctccctacctcaatctcctctctcctcctgtctctcactctatgtcagttccgttctcctacatcctgcagatgaggcatgctttctctgtctcttcttgtgtgtaactaaaaatgactccaatcaggagaccagctgtctcactcactgttctattgctctgaagagataccatgatcatggcaactcttagaaaggaaagcatttaaccgggctagcttaaagtttcaggggctttgtccattatcatcatggcagggagcatggtgacaggaagtatggtggcagttaggtgtggtgctagaaatcacctaagggctacatcctgatctgtaggcaccggcttcggaaatctcagcgcagtgacatgctttctccaacaaggccgaccctcctaatccacttccttgtggataagcattcaaatagatgagcctttggagacattcttcagaaccaccacagcagccatggttctcatttcaaacactcatgactataggacaggggaatcttgatttcattatccattgctagaagagtagttaaaacattctatttgagcctgcagtacaccttggtcccgtctactggggctggttaaatgaaatggtctaggttagcatgatttactcaggaatgtggggaagtggttcccaagggcatagatacttagagacagaccatgccaatctgttttgtaggtaatatgtgttcaatgcagaaaaattagaaaatactgacatgagcagacaagaaagaaaactccttctaccatcagaatgtccttcagcatctcaaagtttcttagaaacatttgtatttgctctaaacactcttctcactcttggatttttgagccataataaaggtaatatgcagtagtaaaaaagacacccacatcttttaagtcttccatacaaattattttttaatgtggagacaatcttttaaaatggaagttaattaataatgttatttaaaattataagtatttcaaaggaaatagccaagaaatcgtgaacagacaacaagagaagcaatctttagatggactaatcatgagaaagatttctgctccaccctcagaggagatgaaaaaagagctagagctagccatggtgagacagcagagccctgggagtaagtacataccagagggaaggagctatgtacaaagtacatgaaagtgaaatgattgttttgggtcttagaatgaaaaaaaaagagatggagaggggaaatggaaaggggaggggagaaacagcaggagaaggaaagggagggaggagaacaggttgggagaggaggagaaagagaatgttgttgtggttgggtatgtttggtctgaacaggacaccctttagttgctatgtgaacaacacaggtcaagaagaggtaagatagaaggtcagagatcaaaatgtgcttaaaacagagaaaatctgaaaagggaggagaagagtgacttagaaccagagattgggaagggagggacttttgatactcatctaagtctcctaagccactaaaggtaaaagaaggctggcatgaagctaagggaagctttgacattgctttctgaaaagatggagcatatctgtagccatactccagccccaaacaatgaacagacaatattgatgctctctgccatatacatttgcaggcactgaccaacattttgaagtaagtttaattcctacctgcagaaacttcttggagcacccgtgctttctcttcttgtccaaaaacctttcagctctgccccagcaggcaacagctctacacctgaacaaggattgctatcagccagcgagacttacaaaagcaggttccattcatgagcacaggcagagcaaacatagatgtcccatactgatactagccaagagcccagacccttggctgcccaataagacaaacaccaggcaggcagtgagcatttcccagactagagatgggatggctttggggccatgagaagttgctcttctcttgacttttgaaatcatactgaagtgaaaaactcacatacctgaaccagttgccaagaacaatacaaggcagaaagtgctaaaatcatcatagccgagccaaagaatacgatggaaagcaggatgctgcgagctagccatctagagaactctggagttggaccctttgagtgaagtgggagagagaagcctcatgattaatgatgtttaatgcactgtgcattctgctgagaagggcgtttagagcattaggaatagagccagcattttcaacatagcatttactttggattcacttccatatattttgggcaaaagtgagtcatggataaagtatgtcatgcacaaagcagttattctttttttcttcaggcttttgtacaatattatgttcttttctgtgttcgacatggcgggtccatctctgaaaggctcctggaggtacttgcaatgattacagggacaactggggatgactaaggatgtcattatcatggaatgatattatttaacatagttggctatatgggaatgatatcgtctttggatttcttaaaatgatcttaaagttagtttacaaaatagtgagtttcattataatattttacatatatatacatacatgtaataatatgtatatatgtatgtatatactgaaatttgtctttagaataaacaaagaacttccatctttagtttgggttttataaagaatggctattgtgttgaagtgatgaactgagtctgagtctgatggagcaaagctatggacagtattttcagacacatctagtgtacttcccccaccaggtataccaatagcagagtcgccccacagttattcttaaagtctctctaaaattcaaactgaagtgtgtcttgctgctctgcagctccagaatgttccacccagcatggagtcagttgggacgggccttgcacaccagagccagcctgggaccatcttaggattgcacagccacctgggtccatcaccatgtccccaccccctttagttttgcttcactttgatgatgttcagctttctggtggctgtggttctcaggacatcacattcatatagatacatgaccacacaaatgccagcggaatgtgagtcagcataacagagctccctacaaactacagacatcttcttgctgctccccagctgcttaatggctaaaaggatccagtgtctggggactgagacaaatacatgaactattttaggaagcaattcagtcagcattgtggcaggtacatgttcagtaaagtattggagccaaggcccatacaattgggttggatatagtcaatccagcaacacttagccacatagtgggcaaagaggaaagggagatgttttgttttgttgtttttgagacagagtttctctgtgtaacaactctggctgtcctggaactcactttgtagaccaggctggccttgaactcacagagatccccctatctctgcctcctgagtgctgggattaaaggagtgtgtcaccactgtcctgatgaaagggaggtttttaatgtctttggaaaaggacacaaatctgtagtttcttccctttttcagtgattttgctggttgatgatagacttggaagtgatccttctaagaggaagtgcaaaccagggaggaataactctcaccttctagagttgtaatgacctcaaagtcattattccaagatcgcaaacatttcactgtaagaaccaatgagaagtcatatatgatcttttgggttgtctctctctagatcatctccaatttctagcatcaatcccatctctaaaggactgtgatgaaaactcatatatggtaggatccaagtaagcacacatgcacagacacacacacacacacacacacacacacacacacacacacacacacacacacaaaaacatacacacatctccaggtaagcacacatatgcacagacacagacacacacacacacctccaggtaagcgcacacatgcacagacatacacatacttacacacacacctccaggtaagcacacacatgcacagacacacacatatttacacacacatctgcgggtaagcacatacatgcacacacacacacacacacacacacacacacacacacatacctccaggcagctacagatttggttcttgcatgttttccccagttaagaggaacaggaatctacttggggggtggggtggactgtggcctatgggctgaattgttacctttgtgaggtacattccttgtttctagggcagcacagagacaaagggtacatttagtttgtgggaaaggatgggggcaggggaagaaacagaaactagaggattgtgcaaccgtggtgctctcaaatccctccaggaagtttatgtttcgaagcctttggaagagtaaagcacagctgtttcaaacagtgctgtttactgatgggccacagtcttctgtaagtgttctcagtacttcctccccagccctggaagacaggtctctgttagtagactctatccagcctaagcaggcttatggccaccccagcagagaccgtgtgtctccaaaggcaagggatgttcagagagaagactgggccaggactggggtaaagagaggcagcctgctggatcacagcaaagtcaggattccttgaggcatgtaaaccagactagacttgctgtggaaggccacaccccagaaagcccttccgatgaccagccagggcgtgcatgcagtacggaaccttacaaatcaacataccaattttggatgtcttgtcatctgcagtatctcctttaagccatgagtgagttgataagatgtcgcttgaagctttctctgtgtacttaataaatcttcactggtgacctcttgcctcctccctctcttacactggagcttcaaggccgacatccagagatcgatctatcaacctctaaccaatgatgtcaccattctctccctgccatccttccttaggggtcctggatgtccttccccatgccctgggcatgctgtacatcttcctagtgctctttcttcttggctgtctctgcgctgtgtccagagcaatgtagatgaggcgtggtgaaagctgagagagaaccgggagcttaccaacaatcaagaggcagagtgctggggccaagttggtgtgtgctagcacactgctttgtggccttggtatgttctgtttgagaagagattcttaactataaagcataggaatttagggctattattgggcctctgaggtggagccctgcctggcacacacgaggccctgttcaatccctagcacttccaggaaggaaaaagaagtggaggaaggcagacattcatttggatatttttatcaaatgagaggtttttttgtttttaagagcactttcttccttgaaaaaatatttgaattttcatttgtaacaggtttgtgtaagataaataatagtttatatgtattagttatttgagttcttgcaatgacaaaagcaacttaagtagagaagggatttttttcaaaaataatttccttattgattctttgggaatttcacatcatgcactctaattctgctttcctcccaatcccccatatcattccctcaccccttcagtgtacccctaaaagacaatttaaaaaaaatcaaaccaaaacaaagcaaagcaagcaagcacacaaacaaacaaaaacaagaacaaaacaaactcaaaaagcctcttccctgagagaagggcttcttctggctcacagtcacaggatgcaatctggtgatgctgaagaaggcatggcaacagttggttaggctgcttaccttgtatcaacagtcatgaagcagagagcaatggatactgatgctcactcaactcactctcctttttatttgatccgggaccccagcctacagaagggtgctgcccactttcaggtgggcctccccgcctcatttagcctaatctagacaatcccagatatacggccagaggcttgtcacctaggtgactctagatcctgtcaagttcacaatcactgctaaccatcacaatacatgaaaacatttatgtagctaaaagctcaccatttccttccatttttgaatgaattaacaaattctctggactatttcgactgtgtctatcagccctcaatgaaagatgcatcttgggaatcctccttccgcactgtcaatgcaataaaatgctttctggaagctgctacctcccctacacctcgggacatggactgtgccatatactcttcgcattcctcccttctgtcccatgtcacccaagttatccaaaggtccaactgtgcagctctcagcttctccattctgaacccacccttctacatttaaagccatgtcctcactagtcatccactcattagtcacccaactaataccaagttgtgctttcttgggccctgattcttcttttggcaaattgacattgcatttcctgagaaactctttcacattgggattttaatgactatgcttgtcccttctcaacagtgtttgactaggaactttaagagattctataccacaatctatgtgtgtggtggaagaattttaccctagcaaaggaaacacttcaaagatgtgaactttgagcatcagttagatttttgtgtccaggtagttcagcccatgtctactatatctgtacatttgatggatcttggtgatacaactatgattagaaacctctagaaggtggggtacagcctatttccaacatgatctctccaaaaaattctgttggtaaagtgacatgcctcaaggatttttgcttggggtgtgtgtgtgtgtgtgtgtgtgtgtgtgtgtgtgtgtgtgtgtgagtgtgtgtatgtgtatgtatgtgtatgtgtgtgtgaatgtatgtagtgtgtgtgtgcatgtgagtgtgtgtgtgcgaatgtgtgtagtgtagtatgtgtgtgcatgtgtgagtgtgtgtgtgaattgtagtgtgtgtgcatgtgtgtagtgtgtgtgcatgtgtgtgtgaatgtctgtagtgtgtgtgagtgtgtatatgtgaatgtgtgtatgaatgtgtgtagtgtgtatgcatgtgtgtgtgaatgtgtgtagtgtgtgtgtatatgtgtgagtgtgtgtatatgtgtgtgaatgtgtgtagtgtatgtgcatgtgtgtgtgtgaatgtgtgtatgtgtgtgtgtgtatgtgtgagtgtgtgtatgtgtgtgaatgtgtgtagtgtatgtgtgcatgtatatgtgtgagtgtgtgtgtgaatatgtgtagtgtgtgtgttgagaattgaacctagccccccatgaatgctaggcatgcactctatcatatgctgcatctgtaaccttcagttggatctctctgtcttcatggaaccacacatcaccttttccaccccgtctttaggtatcccttcagctatggttagtgactgccttcaaaccttacttccccagtgtttacttaatcactaggcttgggcaggaaatgacctcaaagaaaatctttttgtagaggagggaagtgaaatgtctaggctgagctgtcaaagcgagtcaatgtcagaatcagctttcagtgcctgtcgctccagtatgtggacgtcactggtatttatgtctgagagcaaagtctaccatgcaagtacttgattggatccctagttccacttctgactacgtgtgtgacctagaattgttactcagtctttaaactcacttttcttatctagaaaattgagggaaagtgtacgagtactgaaagaacactaaaacgaattattttgaagaatctgagacctgtaagattatttacccaggtgaagaccttgcttagctcaatgtctgctgcaaacgtactgagtaaatgaccattggtgtttcttcttccataaccagggtgtcaattgctccttctgagcctgcttctatgaccctggcatctcacagagtggggacaggctgcatctcacagtgtgtgcaggcctggacaggggtggctggagcaatagaagaatcggatgggacaagtttttagtggtttttatttttgttttttcaaagtagtggaaagtaaatcaaaggtgaaaatgcaaacctggaaaaagaatggattccattgttctttactggataaaagtcttcaaacactgctcattctgaaatgacacacaagcaacacggctgactctctgggccagcctcttctctactattgatggtggccatcttgggtttctgcttcatgtgggtttggctgccattattgtatgagcaaagaagacagacagcagagaaggctgccgaagccctgcccctgcctgtaatttgctcatcactgatgggacatctagactctggagggacaggattagaacacttggttagtaacagaaccaagtgttcacactaacatgagcagacagaaagtcactctaaagatggcacagtgtgtcacagatcacagagaaattgcagagaccctctccactctgcttcttctctctaaagcactgtgactctgcaacagctcccaaagtcagtgaatcactaagcagccagactagtggctctagtctactttccccaagtctacaatcttaatgcacaatcggctggcctagcatgggtcaggttgctttcctgttagcagtcagccattgtgaatggcttccacttgttctacagtccattctagccacatgtcccatatgagtggacaagctgggcaatggacagagatggctggaacagatcttgatgaacaagatggcaaggaacacaattcccatggggtcctgctctgcatcaccccattcccaattctgccccaattctcctacattctaaggtggttctgtactcattgccattagcccccttcctgctaggtgaaccttgaccctagaccagctttctgaaatcaaacagggtggaaatggtaggctgtagacccaaacagacctgccacttactagctctgtgctttggttttcttacctataaaatgcatacctaatgtatatctaatgattggtcaggcagatgccaaggaataaagtcattatgcttaaaattcctggcatatatggtatatctagttctatgaattttctttgcttaattcagaaatcttcaagagggcatgggggtacctataactaagaagggaagggagagaaatgatataactttctgaatagcatgttaaccttggcttctttgcaatgaccctaagcagacattaaataatttaggtctgtgggcagagtcatagaagccacactgtggtggatacagttcttgctttagagacaaaccagctgtttgttcagtgagccaatgataaacatgttatcctctgaaaacatttgttgggatggctccatggtccttcaaccttgctctgcagatgtgatactcccagagttcagtctgttcactaggtaagtgaatgcagcaatttggcattgtgacctgcacagacatgctgctgtagagagacacacaaaacacagcaagccatcaacttttcctaaaaactatacttcataaagtcacttcaatgagcattgtgtcaaatttttagatacgttatctatttcctttctatgagaatttttccagattgatgacagcactggaatgtaagcttggctaagtctgtcccagcaccttttctgataacacatttgcaaaactgcttctcagcaccttggttttgttgaaagggttagtggctgtggtgtctgaatgaggctgccccacataaacttacatgtttgaatatttggtccccagttagtagaactgtttgggaaggattacaaggtgtatccttgttggaggagatgcattactaggagtggtttttgaggttccaaaagtcattttctctcctttctgtctttcagctccagggatccttgaaaagaaaacaaataatcaacctgcctcctgccaacagcaagagacccaatggctttgttgacagctcattccttgacattaaaaggatcagggttggggagaacctttctacaggtcagggggccctcccagtaaataatggacaaagtcatatgatgccgggggccttgaccatgagccaagcacccctgagaaagactaatgctctgccccctcctgcacattctcctggcaacactatgtttaacatgggcttaaaggaggtgaagaaagaacctggggagaccctgtcttgcagtaagcacatggatgaccaaatgacgcaagagagtgcttttactaataggtttggggatgaccctggagaacaactgatggaccctgagctgcaggaactgttcaatgagctgaccaacatatcagtgcctcccatgagtgacctagagctggagaacatgatcaatgccaccattaagcaggatgacccattcagcattgacttgggtcagcaaagccagcagagtacacctagacctcccctgcccatggagaagatcattatcaaaagtgaatattcacctggtttgacacagggcacttcaggctctccccaactaaggcccccatcagcaggccctgcattctccttggccaactctgctctccccacttcatccccaatctccacagtcccccagagtcagcctcagcctcagacagcatcaggagcaaatagggccctgccaagctggcaagaagtatcccatgctcaacagctcaagcagatagctgcaaaccgccagcagcatgcacgtatacagcagcagcagcagcagcagcagcagcagcagcaacaacaacaacaacagcagtcccctcccagctggccagccctgccatcctcttccgggccatccccaggggcatttgtgcaggaaaaaatccccagtccttcctttggccagcagccattcagcccccagggatcacccatgcctggggtagccggcagcagcaaccagtccaaagcagtggccaactatacttacaaggctagcccctcagcccaggctggacacctggatgtgcttctacagcaaaagcctcaggatctcagtcgaagttttattaacaacccacacccaaccttggaaccccgacatggcaacaccaagcctttgttccattttaactcagaccaagcaaaccagcagatgccttctcttttgccttcccagagcaagccttctctcctgcactacacccagcagcagcaacagcagcagcaacaacaacaacagcaaggctcattnnnnnnnnnnnnnnnnnnnnnnnnnnnnnnnnnncaccccccccagccacagagctccttggtagctcagcaacagcagcaacaccaacagcaaggctcaatggcagctcagcagcagcagccaccagcccaacccacccaacctttatcaagtcagcctttgctaaggtcacccctgccactgcagcagaagatcatgcttcagaaaatgcagaatcagtccattgcaggcctgggatatcaagtcactcaacagcacagacaggtaagggctttggttctttaccccagagctcccacagacaattagtttggttattatggcatactctcatgcttgtggtgagacatgagtaataccagaaacccaatggtcctagcaggatcttggttctctgggtacatctagggcaagcactaatgtttccttatatgctgtcattgctttggggccctgtgatgatcaacagttcttatagctaatgtcttggtgatgtacccaattgtccatcagatcctgatattattggtgttcattcatccaaccagaaaatctgatcaatatgcattgaacactactatgtagaagacattgtggttaaggttgaacatagaataaggttagagatgacattgagagtggtcaatgatgtggccaactgttgcattcagtcctcagcctctctaatagatcccacatgactcaatgctcacaatgttcaccaacccaaaacctcaggttccgtctagagacagagtcaagcacttaaactatcattttaatgctgcatagaaagagcaatgacgtgagaactctaaagtcttccccagcaagtagaaatcaggaatgactttcataaagaattatgcctgggaggagtgataaagggtgaaataaccatgactatagcaaaataagaatctagaaatagaaataaatccatagttatcttatgccctttggttttacattaaatagaggtttaattctatactggtaaatagtgtcaagaaattggtcactcctccagaacaattactggtaagtgctgatcccaggggaggtggtagaggaatctcttcctggaaggaaggaagaagtttgaatatttcattgttcatgttgttggcaggcgtgctttaccatagggcagcaagttgcctggtagagaacggaaaactacaggctaccagctggaagagtagaagattcagcttccctgcccaacatacgtgtgtgcgtgtgtgtgtgtgtgtgtgtgtgtgtgtgtgtgtgtgtgtgtgtgtgtgtgtgttctaattatgaatcatggaatagacttaggtagacttgtatatattttacaacattaatatgacaagaatagtcacataatactttcataaaacagacaattttagatgacttaaaaagatagcagagaacatccttccaatatcacattcaagcattttgtcctggatgatcttgggttcaaattctcccttgacactccttgtgagcctccttaagctacttgtagaatctgctgggtttgtatggagagtggaacaaggttattcctaaatgagactacacaataagtgaggattattcccattctcatgtcaagtgctgtaaataatcaaaatatttcctttaaggaagcaagcacacatgaaagggaggtctcagattaacatacaccattctaaggacatggattctgaaatgtaaagagtaccacagtagccaggtggtggtggtgcacccctttaatcccagcactcgggaggcagagagagacagatctctgtgagtttgaggtcagcctggtctacagagtgagttccagaacagccaacactgatattaatccctagtaaaataaactgcataaaagattaaggtctgtgaggacagaacatctctgacttcttgccttcagagctgttaacaaaaggacttttttaaaaaatctgtatcaatctcaagcttcctgatgataaatcttctgcagccaaaaggaaatatatgtgtggtactcccaccaacagcatctccatcttcctagacccactgctggtatcaccaactgtgcacacctcttcatcctcatctctccatccttcccaacttccagggccttagtacaccaatgcatgctgacagccaaatcagtaaccatttcccagtggttgagaccatttccacatttctcaatgagtatgttaagaaaatattcatctttaaaaacaacgttaagaagtggcagacatgctgagagcacttcaggctaaaggtctgtctttcctacacagcagccaatggcttttcattgaatggctcagctcgacttactggcttatcaggactcaattttttttccaaagatcttccctcttgaactaaaaatgcattctttcccaaagccatatggccagttgcctgaaagtgtgaatttttctgtcctaacactggatctatgcaactcaaatagattctatatttggtttagaattctccatgtctaaaactcctaggagggaattcagccagtaaatggatggtttgttgtgactgaaacacaaatttatacattcccccttagtagaaagccaagttcctcaatcaaatcctaagagcctcatcccactctccctacctaaccaagaggatcctccacacttctatcagccagtggtgtaaatcaagcaatagcctgccctccttcccaccttcttatagtaattttgcatatgccttaaatacaaatacccagaaaactgttttcaagatgcaccaagtactggagaaagaatcagcttatctcttgaattctgacaatacttctaaacattagtagccattgaacatgcagataggggatagaaatcttgcatcagataaaactcctttctaaatggaaaatcatcttgaattcaaattttatagaatataacacccaagcctctgctggaggctggaggttatctgaaggttcatcaccaggaactgagcttagagacaagacccaggttagaggaaaaaaggagtttaaagaatgagcagcctaggaagcaatcagtagagagaccagaggaagtgacaagtctctggccaaaggtgagtgtaaagggtgtgagatagagaaagaagataggagagagcctcaagagaagctaagcaattactgccaaggacctgtggccatttggtggcttcagttatgaagtaccatggctacatcttgccaagaaggaaaaaagttgatataggctaattatgggctgtcattggcaggccagaagcattaatttacattttcattttatcttttctattttatcatttatctttgaagcttacaaagaaaattttgttttaattctccatgaaactaatgcctagaccaaaatacaaaatgaatttctagctgtaattctgagcaagtgttttgaactttcagaactccagggtagttcactgacttgtcttctccaatttcatgggcttgtcaagtctcttggtttgtcccaccagaagtctagagtcaaggattccaggttaaactcatatctgcttcattcttaacattggcactaccttgaattcaggcatccattcattcaaaaaatgcagaatgcctactgtgtgccaggcacaattttggttgtgctacaaatgagagcaaaaatgaaatctagaatcagtaatgggtgcttgtaaagttctctctctctctctctctctctctctctctctctctctctctctctctttcttcttaaataaacaggtgaatattttaatgaactatttccttttatggttcctaggctagtgctgcatctaagataaaaatgacaaaagaacagtgtgtgtgtgtgtgtgtgtgtgtgtgtgtgtgtgtgtgtacgcaggtgtgtgtgtgtagggatatgtatgcaagtgtgcatgcatgtggcagccagaagtcaacctctggtgttgttcctcaggcactgtcctgtcataggctggcttgccagaaagcctcagggacccagctctcaccacctccatagctttggtattccaaacacccctggatttgtcatgtgagtcaaactcaagtcctgatgttggcacagcaaacggttcaccaatggagctgactcctcagaccacaactttaatgcaaagattttgagatttggttagatgttttaaatgataagaaaaatgttttatccttttgcttcatccattagaatttaagagcttgttcagagccactcccagtttcatggtaagataaaattgtaattcttccattcattaattcatgtggtgaaaacatatcaagcacctacagtataggagaaactgaggattaaagatcaaaagaccctctttctatgcacttagcctaaattcccaggaaggcatggacctctgcatccataagctttgggaggaaggcttatttcttcccagctttgtggattctactagactcatacaggacttcatctcagtccttcataatccatcatgagtaaaaccacacagacctttcttaagccatcacaattacttttaatcatactagtgtatcctttgacagaacagaatctatttgctgggtacccattttccactcaattttattatattattctggtggtttttttctcatgacaaaatggaatgtattagtacagagcaccaactcctgtatccattgatgaacaaataaacacaataataggggaagatgtcagcctcaaagcataatacataaggcccaactctacaatcagggaaatcgcttcttttattctcatttgaagaccttctggagtggcatgtaatcacaggagtgatgtgtacttaacattagggactcatttagcctgttgaacaccaagttctgaactaggaaaagagagggtatagggttaagaaatagatttaatcctagagatggaaatgcaaagggttaatggaaaagctgacagatatttcaatgtgatgtgtatccctgtacaacagtctcctctgcacctattccaattagtcttgctttttctagtcagtttcctcttcctgctgccagttgctatttgttgggtagagggctttgtagtttcttttagtgtaatccaaagaaatacaaaaggaaaaggacatttagagcattactcagtaaatttgcatagtcatagttcattagaaacaagaacaaagaaatgtttagcctgctggggtgagagaggtgtcacgtgagtgggtcatcttactgttctactttttaaaattgagtttcaccatggaagatcaaatttacaatgtgcattttacacacacacacacacacacacacacacacacacacagagagagggggggggagggagcgagggagggagactaattagacacctctgaaagaaattgatgagatgaatttgaagtttgttctccaggcaatagatctagtggtttgtaatagtaaaagctgctgtcctgtatgacctgtaaaatcaaatttccaaagtctcccaggatgcaagtgaggacgcggctaacttctttctctttccattcctccgtgaattccctccacccctgattcacagcaaactctacatttgtcttctcatggaacctgagcttctgccccagcaagcagggagctctggtagcccctgcttggtgtttcacaggtcttcaagggtaagcccagaagtgtgcatacctcaggatctgcgctttggttcacatctctactctggctctttatccaattaccttcctctgtggttctactcttctttcacacttcacttattgagcaatttaggcctagcctcttctgtaacttccccaaggcaaccctggaaaggtacaggagcagggatgatagacaatgaactcattattggcaatgaagatcaagagatattacctaaagaacgatccatgttaggggaagccatgaagctgaggtgttggcagctcaccaccatgtcccgcaaggctcaggcacaaataatgaatgctaaatgaacatgcccatgggcacacataccctgaatgctttctggccttagccctacctgcttcctcctggtcttgccaacatgcaacatgaatgcttaaagtgatagttggaatttacaaacttctcattgctcttcattttcttgggataaatcctaatttcttatgttgcttccaaagccctgtaggatccaacttttccccaaacttctggacttacagcttccattcccagccttcttcttcccttgacacccacccccacctctcctgcatacataggctgctctctgctcactgcatagagagtgtcccttgactcataaagtgatgcactttctctccttcccacctgcaaggtccttctgccccaaataatattcttttctactctggccacccagggtttcttggcctctcacccattttgctctattcactcctactttttgtcctttagtgcacaccatccttcatctctctgttggctcatcaatgccttcctaactagactgcaagctatttgaagacaaagattgtatctgtgtcctttatccctttactctgatccctaacctaccttccatgttatagggatcccaaacataaattttctgaacaaatgattgatccagttgagccatcattctttctgctgttctggacagccagagacaatgaggcacggccttctggtcttcagatagttagaacatctggcccttgcatcttcttccactaagtcacctttaaactctgtctacccttgacccacagacctagccttcaaattcttgttttcagagcaggaaaccatggcattccctctcagctgtcctatgaccaagctggggtgtgagttttgaagaggagatcttaatgaaagttagacccacctatacccaagtgcccaataggaggattttatcaggatatttcaagagcttgttctctgccatactggaggaagtgagaagtcatgtgaaaactgtgtgggttgtttgcaaacacaggtgtaacgtgtacccctcacaaggtggagcctaaatgttgactcatgtttgctcttagtccagctgctacagtctagagaagcccggaagggcctgagccagggacacaagatctcacagtaacaataggaatgtaacagagcctctgctgtgcagttgcagtgggtctggacagcacttgctaactcagccattctccctactctctccattggccctcatacccctcttgcagcccagtgtgagtgtccagctgtagctctggagggcttatttcattggcatgagtgtctgatgtctttactctgtcattttgacctctctttaaaaatggcaccaaatccttcaaaacccactttctaatcagtccgttgcctcactcaagtcccttttgaatgaaagccagcatgccagtggttgttacacaactgcacagccgtgcctatctgtctgctgctgttgtccacatgctattgcaattctccctcagctcatcttttttaatatttttcttattcttgaaattaagatataatgaaattaaattaaaatatacttaaattgattaaaattaaaatataattgcatttttccctcttcccttctcttctatggacccttctgatgaatctcccccctctcaaattcatggcttctgtctctttaattatccccccttacacacatgcatacacacacacatgtgcacacacacacacacacacacacacacacacacagtttgaagtatataaacacaacctctatgtttgcagggctgacttcttggtatcgaataaccaattggtatgcttttccctttctgaagaagactctttctcccaaatctaatcattcctcagttgcctgtagttctttgtctaagactggggccctgtgggatttcccccttgcccatcagtgtgtcttctgttggtatcatccttgttcaggacttgtttaggcatccatgttgatgactgtagcatctctgacatttctaagaaacacaatctcacagcaaacttcctgttttcctggattttacaatcttttcacctcagatgcgttgtagatatatcagttgtgggtgggtaccacataggtcacttgttctctgcatcttgattggtcctgcttttctgtaatggtcttcaacctccttctcttcaactactgtatacctccctatagtatcaagacagtaaacaattctcccttgctccaaactcctgaggctgaagccaggggctgccttccaatgatcactgcaacttggcaggctcttctcatgaacttgcctccagctttgccctgggttccaataatctctgcaacttggcaggctcttctcatgagcttgaatccagctttcccttggaggtagtctcccctagggctctgctttactacttcagctctcctccccagacatgccattttctaagtactgcctgatggctgatcgctgtggcctcctatcatcttaggcagttatgcacaggtcttaccctctccagagtcatctctgagtgccagtgtcactgtgatacccctccccaaacttgaaaatggcttagtttctcttctgccagggcccaccatatgcgaccatttcatgagttttctcatactgtactatcatttagttaggtcaaccagagggtcaacagaattgtagttttctagaaatttcactaaggattttttttctccacctaaacaaagcctgccatgtttcttaccacactcattgacttctactttaaattatgcttaagtccatagattagccccaaacaaggctttgaaaatactagaaatcagagtctatatgtaatttaggtattctcttgttttagtttatgtctaacagataatagtatatctgaaataaactgtcaacttatgggcagagggagaagaaaagggaaaagatgtcactttcatcatttttggttgccgcatgtgctgcttgccatcctatttccaaatgcatccatacttgatactccctgatttatgaagtttaggaaatgggtgtaatgtcccattgcaataggtaaagagttcttgctgttctgtcannnnnnnnnnnnnnnnnnnnnnnnnnnnnnnnnnnnnnnnnnnnnnnntgttggtggataaaaattttgactgttttcatcagtgtctttaattgatgaacaggtaagtattgaatactaagataagtaacatatcataattataattcctatccgcaagttagatgtagagtaccacggcacattagtggagtaccctcgattctctagctgaagtctttgtgtccagcacacagcactatgcagtaattgattccctcttggatcatcttatcatccatttgctcacttccttcctctgcatccctctccacagcagccctaggtctctagtggtaccccagccgtgctctctagactcacaaacagaacttatattgctattcacagcctgaacccctacatgcaattcccccatgggggaccctgtttcttgatctcttagtttttttgcctcttagaaaggctcttatttggtggactgtgtgctggtagctaactgatcaagggcatgtggaagggagaagcattaatactccaacggctggggctactgctcagtgctggagacattacataacatgggaaaagccctgagtttgagcctcaccacttcaaaatatttttaaaattaaaagtataaatgaagagctgtagagatagctcaggagttaaagacaccctgcccattactcctgcgggacaccagagttccgttcccagcacacacaaaggcagttcaagacttctgtcactccagctcacaggaactaacacccttttctgtcttctgcaagcatgcacacacacacacacacacacacacacacacacccacacacacacacacacacagataaaaataaatcttaagaaataaaaacttcaagagaagttataaaccatttgagggaagaagaggaaggggaggaagaggaagaagaggaagaggaagaggaagaagaagaagaagaagaagaagaagaagaagaagaagaagaagaagaagaagaagaagaagaagaagaagaaaagaaactacttagcatagataccatgatagctatatgttaattgccgcagtcagcaaaacggtggagaaataagcaaccctcacttatggagtgccattgtgtgcccagtgcatgctccaagacattcctaagaacccagagcagttgtcactcctaacagacaaagactttgagaccagagtagcctgctaattgacttaatgtcacaaggtaagcaaataacatagctgaatttggatacatgtttgtctacttttgaccatatgccccacaccggcatcttgttgccaaaaggcctgcaggcaccatgcctgccctcaagctggctcaggcctgaccttaatgcagggtcaaatagttgctactttattgctccctttaactccctttagtgtgtgtgtgtgtgtgtgtgtgtgtgtgtgtgtgtgtgtgtcactatggctaatgcaataactactccatgtgcatcaaatttctttattatatgtttccatgaagttctggcaccaaattatttccaatagaaatttcagttttgaatgttccccaaccccttagttctcaggtgttagtcagttgcaacctactctggttataactggaaaaatgtattgatggtcttcctgacaaactgtgggttctacgcctgttggttcatttgctgtcatttagtacattatggccctgtttaagggacatccaggctactgattgggaatagactgagcaagaataattcttgcactgaactaagccagccactcactcaagctcccattccttgaagtctgaactgataagtttccccaaaacaacagaaaacagcacacagcagaagaaacatatggagttaaaaatgggtgaagaagatgggatcctcaactgctgtctttaaggggtacattagttgagggtctgatgggccagcaagttcagtcaccgggaacttactcatgaagttgaagccttctgacctctttctcacctgacccttcccatcactcttctcatcaagcactggaaggggacagcttgctatgcacactcttagactctagatactgtcccctgctagtgtcctggctgctgttccaacatcgctttcagaggcagaaactcgagcaggtacctgacctcccaacagcctttgcttttgaaacttctccttcttttatttatttatttttgttgttgttgttgctgttgttattgtttgtttggttttagtttgggagatgttgagacggggtttctctgtatagtcttggctgccctggaacttactctgtgaaccaggctgctctagaactcagagatccgccagcctctgctgggattaaaggctctttcttaactagattctctgacacacctcatgctttcttttaccataggagccacttaaagaaagtctattgagtccccaggctagccctatgcaaaagtctattaactcacaggaccgtggcacttttatagtgctgtgcttgctagaatgttcagtgtttgaagatttgtttagtgttcattgattgatccaagcactacggtggtgacaagaacatgatctttcatgaaatggagacttctagaatagggagaaatgtgacccccaggtgtgcacagagtattgtggaaacctcagggcaggggtacctaccttaccctgggaccaacatcaccattatggaaaagggagtttgcctagtgttggagactgccgtttttgtattgtttttgtggagattaaggagtttggaaccatccactctatttccatagtctataaaaagaacaatcaataaaggatgcatagtgtccccagccacctggcccagcaccatccccatgctgtaaattcaactccacatcaagcctggaagacaacttctgagcaagcagtagtcatctcacaggcaagatggtgtcagagagaaggctttcatgtggtggcaagaccagagtccctgcatatgtaaaggcagagcaaaagcaggggttcagaaagacagcacaaaaggcaggaaagagaggtcccaagagagaagcaaaaggaaattgggtcaaaaagtgcatttctgatcaaccctcctgcttacagatactttataaggcaatcttagctctggtggctttcctgcctctgtttccagatccagataaagtcagtcattcccacaaagggctcaatttctttcctctttatgctacattcaatgtttttgagtggaagagaaggatctagttctgttcttgctaaattctgccacatttttttctgattgcttgaaagggagccacatttaaatggacatgaactcaacatggattccatggcccaaaggtcaggccccagtggaagagttgtgatgtgtaagtgctgccaagagtcacttatgcagtgaagccttgagggctgaggaacagtcatgtgactctcactcctcaccctcagagttgcagagactggagacccctctatggcccagcacgagtatgtgagaaccttgccaggctgctccttggggtgtgaggcagccctgaattccatgggaatgagcatctctgccaaattcagagaccaaagttcctcttgggaactgaaggaagtggctgtgagagctgagcccacatctccaagacctggactcacccccccccacacacactctaagtcttgtgtgagtgtgtatgtgtgcgtgtgtaagacatagatattacataatttgctgagctgggtaatcacacacacacacaccaaaagaaatcagctcctcgaggtaacccaatcacaaaaagacaaacatgatatgtactcactcatatgtggacctgctttatgatagtagtgaccgtgctttatcagagctgtttttaatgatgttgctcagaatactttccttccaggtgatgattgagaagctaatttaaatttaaaaaaaaatggtgccaggtaccacacgagtaaaaaaaaagtcattatgtatatggacccttttccaagtaagaaaaaattacttccttgataaagaatcatctagctggctcaaagtcaatgcaaaaaaagaaaaaagaaagaaatcggctccctaacattgcttatgtggaatcaatgtacaattttacatgcagaaaacattaagtcaagtaaaaatgatacgcatggtgtctctgcttatccttatgaggccaatatacttcacacccatgtcttgtgctctgactgtcatctccaaagctcagctcagggagtatttcaaagacctgaaagatcacatgggccatcaatagagttggaataacttacagagctctttccacccggcatcatagtgaggttgacaagaaaatgtaccaacacaaattccaaaggtagacatggtctcacaagctgagctgaccatccccatcagcacagaattgacatgtgaacacagtggaaggtggccatctctgaacatctgttgagagtgaaaacatttttcacctcaagcattatggcaggcacactggtcattctgttccttgtcacaaacctcattcacttttacagtaatatgaaaagaaaaggagaacacagggaaatccctactggtcagtcaggtttccctgtagtcatcacttccctaggaagccagtcagacagatccaccccaaccgaatcccccctccccccacccctggcccagatcttttcacccattgcatcaacccttccagaatgatcttccttctgtcacccccaatccccagtccccagcacattccctagcactttgtaggcacttaagtatacattcagtaatgggtggagtgctaaggaattgtgtcaggtcttagaggacactaaaatgaacaagacagagtccctgccctgtctgagcatgagacaggtagacaatgattgggcattctacagtttgccaagccatgcaatgcctgtaagtatagcctccttaaatgacaacggagagaaagctgaattatcagccacatctactgcttgcccaactctgtaattcttcaaaaaagaatcctacttcctactgtctgatgtttgctactaacattggttatctaccaacactaactgacagctgatacagtatcagtgctaccaggctaaggtttcaacctggggaagagcatagcaggaggaacccaagaagtagcatcaatgtcttcttgggaaatctacttttcagctacatgacaaactaaggttgagcctcaaagtctcagaactgaatgcaagtccatagttggctttgaggtaaacagtgaaattaagagccaggctcagcaacctggttttcttttgttgccattgcccctttcctatcaatgctactctctatcaacctcccccacaaaggaataatcaaaagcacacttgctcctcccactctttggcccctgttctgctggtaacattacttattgaacatccttgtgtacttggctgacagacagtaggaaggaagtgaaggatcttcccttggggctgctgattcaattagaggccatttagaaggataacatgaaagctcacacagaggaacccagctcggttgttgctgtgtgagaaactgctggggatctttatcgcactggaccatcagtcgtcctgtagagtggtctgtctctccaggctaaataaagacaaaactagagagcccagcaaggagtattggcacatgcccagaatcccagaattctggaggctgaggcagaaggactccaaaggtgacttggactataaccacaggcataagtggggggaggtaaagagaagctggaaagatgtctcagtggttaagagcacttgctacacttaaagaggacctgggttctattccagcacccacatcacgtgactcccgccgcctttaacaccagttctgggagatctgacatctccttctggattctgtaggcacctgtacacacacgtcacacatgtatatacattaaaaataaaaagatcatagaagtcggggagtctatctagtatatagaatcccaagtagagtcagttgaaagagtaatgacctcaggtgaccttgaagccaccactgcgaccttcacaggaagagcacacaataacctccccaaggacagtctattgaacaggttaaatcattttttttctcaatttttgttcaagagaaattacattttgaaatgccaattagaactatcatacggcaaacaaaaccaaacatgtaagagaattttatgaaacatagtttctgcaaactacttggcgtggcagcacagcagcaactgtccgtcatgtgactctacactttgaaaatctgagcttacccagcgcacatggcttcagtgccattgactatttgggtgacccattaatctgtttacctctctgccttcgtttttctaaatcttcgataaaatacgcgatccaaccagtattcagtgcactttcccgctttgtgataggagagctacatttcgtttctgtgagtaaacataacaaaaatcaaaacagctactgcccactcatgcctccatttcaggggagaaaatacttgttagcatttttaaaaattgaaacataacctttaaaaatgagtaaattgaacaatttgttaagttccttgttcagaccttgttcagtccctccagcacatggaagcaccccggggctagagacaggcctgccaaacatcctaagaccacatgagctatgtggctcttctgcctgtgctgttataggtgtagccaagtaaccaaaaacaatagacattttttttgcaagactggattgatgtgttttgcccaaaccacagaagtactagatttaaagcacaaacaatacaatgcagttcatttaacttactcagtgttgtgatagtattaatgctgtaatcagattgcattgtataaattacatacacagtctcttcaagattgaacttagtttccatgatagttttttttaagtcctcacagattggagacataaatatggaaatttatggttatcaatattttgagccaaatcctaagagaagaggtttggactgaggtcttaaagtacttaactgaaatggagccactgagaaacaagtttaatcttggagacttgtgtgagagggtaggccttcagattcacctctgtgtttcctttggtagtgagggtccaaagccacagctttagatacagtcactttggcttgagaaaggactcctggcccctttcagggctcattttgtagtaaatctagttttatgatgcggtaggccttgtgaagaattccccaccctttggtttctttccttttccttcttgctgtatacaaccctggcacttggagtacaagtagcttatttagagatgtaaatgttcaaatctaggctcagactttcagaagtagtttgagtcttggagatcttttccaggaaaatcattgcttcctttttaacatatatcctaaaagtctattcactttcgaacaacttaattagatctgtgatctaattccaggttactgtttagaaccatttacatctttagtgaacctctggagtttgggcattagcaactgcacagaagcaagcagctaacatatgccctaaagtgagttttaactgcacagaatgtggcccttactttgtagctagaattgtccttggcacatgggctgagcaagagtagtacaaattggcaattgcaaaaccgagtaaggaattgagaaattctgtaactacttgacaaaattagttcaagatagaagaattcgatacaactcaatttcccacaaaatctcaccttctaagttgtttttccaaaatttttagtttgtatatacctttagagaatatggtatatttgatgcagcatgcaagacaaatggaaaaaggattcctaacttacaatatgctgaggaaactgcctcaaggggtgacttttctatagctgtgactgttcagatggacggcccgtgaaagcagcaaatctcccaagtggccagtggcagtgcatcatgatggactcttctaatacatctctatactctatatatcaggcaaacacaggaggagctgcagagaaaccaacaaatagggagggatagggacagagggatgagaattggtgcctgggaaagaaaaagggtagaataaaaatccagcatgcataaatatccacaggtcttcaacacatcagaacaaaattcatacacgtacatcaaaatcagaatcccacaaacttcctactaccttcgcacttgagaagcccagggctgtgcatagctgctcctagtccccaccagcagcctggctgtcctggaggacaggagtctgaaagctccatgagcaggaagagcagtttaccagccaccattgcaagctgccctaagactccagctggtcaatagcaccaagttctacagggggttacactcctgcattcccatgttgccatacctgttcccatgcattctttccttacctaaaacaatcccaagtaccagtgtctatgctggcaaaaccagcctctctctgaccacnnnnnnnnnnnnnnnnnnnnnnnnnnnnnnnnnnnnnnnnnnnnnnnnnnnnnnnnnnnnnnnnnnnnnnnnnnnnnnnnnnnnnnnnnnnnnnnnnnnnnnnnnnnnnnnnnnnnnnnnnnnnnnnnnnnnnnnnnnnnnnnnnnnnnnnnnnnnnnnnnnnnnnnnnnnnnnnnnnnnnnnnnnnnnnnnnnnnnnnnnnnnnnnnnnnnnnnngctgaatcagcctgtatagagttgatgctaacattctccataaggaactgtactgcctcccgccccaggaagcccttctaatgtttagttccatctgactatactattttgaatatatggctggataactgaatataaactaggggtacagctcaagcttatactagccttctccattcaggaggcctctgagccctcaggtactgcctagaaggatggttgtcctggcaagtgcattcaggtcttagcaacactagagatgcagaactaacaacagattaatcagtgaagacaacagtaagcaacaatgtcagagaccactatctagcccctggaaactaaaagataaagtgaagctgccctttgtactgatcatgcactatgtgtatcctacagttgcaaggtaaatctataatcttaattaatcagctattactggctaaggaatgtgactttttttctaggccggggctgactgtgtagcccaggcttacacagaccttgctgtcttcatgctcacatcactcagcctcctgggtgatatgattttatgtgatttatcatgcatttgtatctcctaaagtggatgtatggtttctctaaaattttctttaattaaagaatagagatacctcaaataaatatctgccttaaagagagtttttttaaatatcaataaactttattataagatacattacaaataaataaaaacatcacacacccaaattagccaaatccagtctatacaacttaatgaacttatatgtgattagaactagcattcaaaacataaactgtgaagcttctcattaaattttacattgaatttcagaatcaaatatattttatgcacatatccaccactgaaacaaacaaacaaaaattccatgacagagttagaactacaaacacttagctttatgtcctctttcataagactggactcacgtctactacctacattcagaaaaagatcataaaatagattttgagaaaaagagatcacacaaataaggagaacatgggagagagcaaggagaaggggaggacgctttggatgaattggccagcctctcttcagtgtgggatcagcatattttattcttctccagggcctagcactgtctctgtagggcaggtgtcaggacagtgactgtcacagaccactctgcctctatctttgaaaagtcagggtttctagaacatcaaagaaaacaagcccagctcaattactgcagaagaaaaagtccagaggtaaagaactgtccctgccaatggctgatgagggttcttgtaaaaccagctaaagcaattgagaacaaaacatttcctaagtgaaatgcattgtcattatgagtcgggatgctcgcataattaggtagtgatgcttctgctgacatttaactataagaaggagaaatgttgttgagctagaaatggcagtaggtaaaagtttttggttttatttttgtttttaaactctaactttgataggtattttcttgatagaactgccctttcttaggaggacatgtttgatttatttgaccctgtttataagtgtgtttggttctgtcatcactctcaagccagaaaagcaggaaaaaatgttaaaactctgtacagaggtcacaaggacctttaaggccgcaacttgaaaccacaggcttgcacaataagatatttgacgttgttcttgtggaataaatatataagtaacatgggtttgaaatgaaatctaagaggcacaattgtcaatgtgcaccttctcatccgacatccttattaacgtgactgatgttcgaagaattccatagactccaataatactcatttcttctctttcactgggctcttttctaagcagttttgattttctaaatcttgtttgctaacaacagaattaatgtgtgctttaaaaacaaaatgagaagagctggttagacagttcagcgggtaaagccagcttgagagctcagatcaaatgcagagctcacacaaaagctggacatggcagcatgtatctataatcccaggctgcttatatctagtggaaagaaagaaacaggaaccctcagaggtttcaccttagtcagactgacctatgaatgtgatctgtgtgtgtgtgtgtgtgtgtctgtctgtctgtctgtctctgtgtgtatgtgtctctctgtctctcatctctctctctctctctctctctctctctctctctcacacacacacacacacacacacacacacacacacacgagagagagagagagaccatccctccaatcttagcttccactgtattcctgccccctccagccatgcttgacttcccagaatgcatccagtatatgtccatctcaaagtccatacacttcccattctctccttaccaccctatcacatctatttaggttaattcttcccatagctcttaccacctttgggcatgcagcttactagtggttttgcttcggttaatctgcccttgctagaatttaagtacagctgattccttcttaggattattcaccaacacatacccagcaccttagatgacatttggcacatcattaatgcctaattcaatatccattgaataaatgcaaggctttttaaccttctctaatagaatgcattcctagaggtctggtcccaggaatctgtggactcttgacccagttaaggtcaactcttatctggggaagctttatttcctctcatcaataagagcaggcactgtgtctaaaggtggtatctctagttaaataagattcttagtccttgaaaatcacatcaaatgtctgaaccacagcaaacagagttactggggattccaaagatgagcagagacttgtatggagatgtggatgctgacccacttgaaatttgggagcccctcccttgagctcagccttgcattctcctagcagctctgtgggccagtctcagtgagctttcaatacccagtatacagagacagtagctacatgctcatcaccactaggactgatgactaacagcaaggtctaggcagtgccagaaagagccaggtgtggccttggccaagggggagacccactatttcctgaaacaggaccatagagtttggatctactcaagctctctcaatggaattgattcctggtttctgattcttgtcattgaataacttttcaatctttttatttttacttaaaaaaaaaaaggctagggaggaggaagaacatcttagaatcaggtgtcatggttagtcaaaggccaacctaactgactctccttttgtatctgggccaaaaacagacacaagtagccaactttgagtctccaactgtattatcagctttgcagtcagacaaactttggttcaaatcctggctttgtcagtctctagctgagtggttgtcatcaaagcctaaattccaggattcatcactgtaaaatgagaatcacatgtggtaattatacggcttacttgatgccttttatgttaagtttctggcacatagtagtttataatgactgtcagcttccccgaatcatacaagacctggaccctctttatggatgctggggcaatgcatcatgggtcttcttgatggttgtctctatgttgtcatgggaagaagttggggagctaacaatggaactaaggttctttgcctcactttctttcctaagtgtgagcacataagtagatatgagagagaaggagaaacacaggctactatacacagactggacacaaaagtgtgttatgaaaggtaacatgcttttccctgcctggcctgagaattaataccagttgctatcctgggtgtgttattttaggtttggcataaacacttgagaaaaccaggacaatgttcatagtaactttcttggggcttaagttttaaatgtcataaggggaaatggagatggcttcacctataaatgttttgctacgcaaacatgaagacctgcacttagtcccaaagaactcactttacaaaactgggtggcatcagcacatgctggggaggtggagagaggaggatacctgaggcttgctggccagccagtctagccaaatccaaaccagtgaattctgggctcagtgggagaccttgtcatgtagagagtgattgagaaggacacctgatgttggcctctggcctccacacatgcatacatactcacacacatgtacacatgttcttaaaaatatggctaggcatttaaaaacctttcagacatgccattcagcatttcccaaatcttccatttttaaaagcagatgctcggcattgcacagacagctatttcctgtccactataacacaaaacattccttctagattcttaagaatataatccctgttgaaatggtggctttgtggtttaagacatgaattctaattatttctattttattattattattttgattcgtttttcaagacagggtttctctgtgtagccttggctctcctagaacttgttttgtagaccaagctgtccttgaactcaagagatccacctacctctgccttctgagtgcttgagttaaaggcatgtgccaccagtgccctgatctaatcatttctaaactctgtactctggtctactcttagaactcaacagaaatgatgaacagtgatggagtgtatacaagacctcctggatgaagaatgggcaaaagtcttctggttctacagtacagtgataattaaaactaaggcaagatttggtctgtgccaggaactgtcccaagtactttgcattcttaattcgtttaagcctcacaattttttttgaggaagatactattattgccacatgtcaaaacacattgaagggcagggaaaatcatgcattgagaaggtagatatcacacagtctccctagagtgccgtatacacgaggaatagtgaatttgattatattcaaaagaggaaattgagcttggggaggccagacattttcccacagcattagctacaaagacagaaaaaagacctgacttagatgacatcatctatccaaagcctgggcccattaaatgttcactttgtgactatttatttcaatgttcagacaagccagcagagtaagtcatccccacatctcaccagatgccccttctacacagaatctgaggaaatagtagaagcactcttttctaaacagcattttctagagtagtcctgaccagtgcacaaattattttctaaactggacttggtcagtggctgcctaatttatttaatcctgatttaaagtttaatgtcctgagccaattacatattgtaccatatatgtaatatatatatatatatacaggtggaggccagaggataagccagagtgtcattccttgagtactagtcatcttttagtgtcacagtttctcacgggaattctaactcaggctctttggtttctgagcactgtaccagtgagctttctctttagcctgctacgattatggtgtacatgctgccacacaaatgaactccttggtgtgaacccagctccatattaaaccatgtaaatttagaaaaacaatcaaagccttggaagccttttgtgaaagataagaaatgtgggggaggggattgagacagcatttagctgtggaacttggagacagttatttattggagttaagagtcattctaataacatgaattcaaaacaaatacactttgaaagagaatcctaagtagagagaaactaagatgttttccaagtgttctttatctgttggtttttcttgattgaatggctatttgaaaaactatgaggctctaaaaagccataggctttgaaaaggcactgggcccaaaggcacatgggtaaatcttcatgagtaaacgggaatggtagtctgtatcacagggcataatgggaccactgtgtcaattctgtggtgtggagctcactaagttgccagcatcttgactgacacatagccagtaggaggtccatgtgcttactattacagtaactgttcattcacttgctggaaaaaatatatccaagcatccaagcttcaagcggttggattgaagcttcaagcggccttgtagatacatgcattaaaagcagaaagccctgacttctcagaacttacacctgatcagagaaagcagacagtaaacaaacagtaaaacatgaagggtgggttgtgagatgggaatattggaaaggaaggagtgcatagccccgaggaccaagagaggagtccctaaagactgggagcactgagaagtgccagtgacagacaggagtggagatgagtggatggctctcctaaaccagaaaacagcatggaccaggcccagcgggagggacagagagagggctcagattcgaagcagcttttggggacagggacttcgtttgaagactgtttggtttttttccccctaagtttactgggaagttgctgaaaggtgttctgttggcatggggctgggttggaggaggcagcaaaatcacgtttggcttccatgcaatatggatgagtaacacatcatccttagcattgaggtagtagccatcttgagtaatagaagataaaggtttgaagggaaagggtcaccaaggcaaacacatgagtaaagaaaactacaaagaaaaatgcccttaggtacaaagtcatgggtgagaatactgcaaaggaagcaagcctacccagctcatatagcactgaaacttagcttagttatgagcatggcacagatgaagagcagcactcctggagactataagtagaactggccagcatacatataaaagactgcgaacttaacagtaactagatgctgcatttcccttcctcctgtcactgtccatttcagaattcctttgagagaaatctctgccaccctatcacagccccaaaaatccatgttctgcacgtttcaaatgatttccatgtgctgttccgttctgcgttcttgcgaggtcatttccactggctgcgtttgagagcatgcagagcacacatgcatagccccctccaactgtgaactttttacctaagcttccctgctgtctctgcatgcttatggaaaagctaaagcagcacaggaagtactacctcatctcaatggcattagcagttaaaatcgcctagtgtctggacaatatgccactgagctacctataaagtccacatcaccgtgtggcacatctctgttccttggagtcattgtgtgtggtgcaagcctgccctgctccaacccctcctaagcttttgctcagtttatccttcttattaaatttatgatgggaaagactatcaaggctgaaaaacttcccccaaaatttgattatttagtcatcttattccttttgaataagaagtttgctggtaaacaatgctgaaagtggaacttctctgttacgagtgatggtttcctattttcttggtccttgctgaggttgaacacctggtttaccttattgggaacatggcaagtttttagtaattgagaaccatgctggttaaagacagccctgctctttgggcacgtcctggctctgctgcttccaggtaacactgctgccactaggagcgactagactggttagtcaaacagaaagtgcctgtctgcctcagcatgctctgcttccctgaacagaagagcagacaggctgagagtgaagatatttctcactgaagattccagaaaaatgaaggtgatctggacctctccttctttgtgttacatttattaattaggaagaatttgagatgttttaacagaaaaaaaaattaaagggagaaaaggaaaaggaaaccaaaagaaatgcaggaaaaaaattagaagaaggtctgttttgttagaaatggaatttttttgtcagaaaaaattttcttcttgaaatcctggatttaggtttggttgtcttccacctgggaagcaagtggcttcctgtgtaggaccttgccccatctgtgccctaacttcctgatgctctgactactgcaccccagtctagcataccctcctccaggttttccatgtgaaggatccctctagcagggaactatgttaatagcattatatttcttctctgcagacattttcagaaatgggagccttcatggcacagcttgcctgccccatgttcagatgcagaagggaccctctattcttcatccagccattgaaatctcatgtctctcttttcagaaaaccaaagtagaggaggaacagccaaagcagactcttgcactcaatgataataatgattaacaggcatcactgtgtgttttaaacacactagtgatgaggggtccatttatgggtgttttcttgagaactgagcatgaattcttaaagaattttttcagatcaaatgcttcatgttctagagccatcagaaatgcacagggccctgctgcctctccacctcagtttctctcatccacatagcagtgttggtttcagtggtggggtaacctgggaatcaggagaaccactcttagggtccaactccattggaccacaaattcattagacttgtgttctcccactgtgtcccactgacacatgccctcatgtgtcagtaactccagtgctggaggcaggggagatgggacaatcagtggagttgtttggctacaagtttggatgagaaaccctgagctccaggctgagtggagaagctctcttaagggaataaggagtgaacatggaggagggcactttacatcttctcctagccttttacatatgcttgtacgcatgcacatatacataaagttaatttaatttaaaaaaacaatatctgtttttcaataaacacagcattgtttgctgagctacagcttgtcaatgttgatcaaagccacaagataaccacccaataaaggaaaacttagccccgactttaagggttttatcaacaaagagccctaattatctcctgaggagtactttggtgccctggctttctcagaggcctctgccctaatgacagtctccgttgacactcagtagaaaacctcagtaccaggcccttctcacctcccattttattttctttaggtctttgttttgcctttaggttggagcactttgcaccaacattgtttctatctctggctctctggctctctttatctcttctctctttccttcccttattttcttacctcctccccccaataaactttctgcattaaaaaaaatagtgtttccagttaaaaaatcataaaatgattgtgtaggtgattttgtcctggacaataatgtaaaccatacaaatttctttcaaaactcaggacatatcatctaaaaggctcagattttctgatacagatataggaaccaaaatctgtaaacagaggcagtcacgttaaataatggaaactagttttcaagtcatcggaatcccacttggtacagcaacagcattgctggctctttggcctgtaaactttactcgctttttccaaaaaatttaatggcttgttttgtctacatagaaccatgccaggaaatttagtcatgcattgacttggttattgcatgtataaaagtgtcattgttgtggtgggatcatttacaaaactattataaacttcagcacatagacttcttacctggcatcagcaccccagctcatggcttccacctgtacaatgccccaggaagccctggttcagctgcccctctaatctgtgtcatgctatgtgtgaaatgcttccccaccctcctgggttagccccacccatcagggtcatccatcatcctctcccacagtggggctagatgttagactcctctaccgccttccagcaaattcctgtgttagtgtgtaagacactggcctcacttgtgggttgtcttgtctctgccatagacatttccctgcgatgtacaggttcagggatcactctctattaatggggtagttgtgagagtgataggacctttcatggcccagttatatatgacccaaggatctaagataatggatactttgtcatcaactcccaacctgagacagtggctctgagtctgcttttttgcactactggcaagtaaagatgtagaaagggctgtgttaaggatcactccaggaaatcctgcatgggacaggagagagagagggaagcttttgaattccctttgtgtgtgggtttacaggacaacagcagacactggacaaaggttggggtcatctttacaactggtttattctcgagactgcacagggctgcaccaaggaggcctgcaggctctacacatgcccctagtccagctaggggggtgatcctgtgctgtgcacccaaatgtgctgtgtcacccattaggttggctggagcctactttgcccatctctgacttgtgctttggttactactgacctccgttatacactagcctttaaatactgtgtagttttgctttctccaggcttgcaggtttctcatgtgtcattaattatatgaaattctctgtcctcacagctgccatgaagtggtggctgccatctaggtctctttcctgaaatgaggcagactcattagaaaccatccttacttagttacaacatctattacagtaagtgtatggcaagcaatgtattaaggataagaatatgtaacaagcaatagtgcccagcacatctcctatggggaggtcttatgggagccaccatgccaccactggccttgctcctttgagtctgtctgtctcttaccaggtctgcttaagtctctcatcatcactggcatgtgtgtctgtctctcatcctcagtgctcctggcatcaccgtgttgccctaacatccattcttgctgtggtatgagagggaaacttgtggttttcattttaggccctttgcccttgcttctcatatgagctgaccctactgtgagctgactcctgcctcactatcaatggttacatcctcagtgatcagaaatgcccctccttccgctgactcttgacaaacgttattaggtcacaggaaagtgagtagaattacctatttcgttgtttgtttcataacctgggtctgttggtgctttctctgacattaccattcactgtagggataatggagacagatctcgaaaaaagatctgaaccacgatgaaaaaatgagaaggaatgaattaaaatctagactcacctttcctcttagccttgtttatctccttagctatggtcatgcagccttcatcacagaacctagtaccattatcacgaacgtgtttagaatgagtaagaaattcacccatctatttcagtcacagctatacaaaatgttacctttgacagttataggacatcctgaagggacaagagaaaatggctctttagatgggaccccagaaatgattctgccaaagtctagagtggtgaacctgtgagcttgctaatgttacaggagcttgggagccctgtaacattagcatcaccaaaagcccactgcagcacatggcagttcacaaacaagaggctgccgcagcatggaaagcagctcataaacaagggcccactgcagcatgggcggcagctcacatagctgcatctccacagctcccagctcagttcaacaggaaagtcttcccttttgccattgtttgtggcttatataaccttgggcaggaccttgtggatcgtgtgacttttctagttagcttcctgggtctcaggtctctccttcttccttccagaagggagtttccatttacaggaaatagccacacagcaggcatgcagagtgggtaaaagtcagagccctgtctcccttgttactgactcacttgaagtgaaccatctaaatgtcccttgcctcagggcctcctttaacatgagctagtgcttctctgagtgttctagagaatgtgtgaaaccctgttatgtgaagggtgggacaggcgttggcagagggcagcactgtaatcatcggagcagaaactgccacactgtaactccaaagattggcagacaaattctagcggatagccatgaacagaactgggttccctttaacaggacgtccctcagaggcagtctgtgactcttgttaaaagttgtccagacacagcttcccttctctttgctttctctctgggttaggatggaaggcactcagttgaggctgatgggagttcaagccaagcttgctcacatccttgttcagcctattcagaagtcgtcagaagaaattacagaatttccaaccccaaatccacctcctaaagccctggaaactttacctatacccttccatgaaaatgcactagctctgacacacattcctgatagcttctaatgagtttcccagtgcagctcctcagtctgctagtgagacaaactgggaaaagtttgctgagaaaggaaggccacactcgaaagtgttaactgcctgacattagaaagcagaccctgcagaaccagatgctggaccatgcctctgtctaggcagtcacagatgtgtgtgatggctcatgcagggacaggttaaaaggaaatggagctaaaaattggcttagtggcctgggtatgtgtgacttcaggcgactttaaggggacttcagctcataggctttggcttccctaacagttagcatccagctgctgcccaaggaggaagttgccggtgcacttagaagataaggatgttagactctcggaaaactcaggtatccagggtcccaggccatgacctcggtcaccccaatcaccaggtgaatttgagagcttgctgaaaactgcatgaggctttattgtaatttaacgagctaaacccatgttagctcgggtctttcacctacccgccatggctcctagggcctcccaagagatcttataaggcagtgtaaggggagtgtctaggggtacgcacaggctcactattggtttgcctccagccttggagggcttgccctgtgttgattggtcaactggttgttatggcccataggccctcccagggtggttgctatgctttgtgcatcattgctgtgcgcttgtacgtaaagcacacccagggtcgtaaagcatagcgccaccagctaacttctgattggttccttnnnnnnnnnnnnnnnnnnnnnnnnnnnnnnnnnnnnnnnnnnnnnnnnnnnnnnnnnnnnnnnnnnnnnnnnnnnnnnnnnnnnnnnnnnnnnnnnnnnnnnnnnnnnnnnnnnnnnnnnnnnnnnnnnnnnnnnnnnnnnnnnnnaaaagggaagctggtcccttcaaggaaagtggcacatgcagtgatcaggggaagccattcaaaaatactggctaagagcaattctaatgctggagtactgtgtcaaagattgttcaggagcactgatagtgctagcttcttaaggagcaagggcatttagttccatttgcaacatctagatgcaggtcccacattcccgagtcattggctttaggtggagacttggataatgtttagatgaaagagtgagtgaacagcaaaatgaatatgaactcatggtaacaagatcattttgactcagattcccagaaggaatctaatggacttgagagaagcaaacaggagagaggtcctgaattaggcaggatgtcacccctatagtctaaacttgtaagagaaaaaactcattaaattcatttgtaagatgaaggctgtaagtcagttggcagatcacctgcctgcctggcaggcaccaaccagcactgcaagcaggagcttagcctgcagtcacagcacttgggacatggagacaggaggatcagaagttcaggtcatatttagtgacatatagagtttgaggccaggctaggaaacagaaatattcaggacagtagacagatgctgagaccagggtaatcatgggcacacatctgaatcgggcatgtaaactataaaagaaataagaaataagttctaacctaacagaaccctgccacctgggtgatcgctgtcaatcttgcatcaataagattcttttttctcatgtgtaaactgaaggggtgactcgatttgttctggaatgtccctcccaattccaaccgaatatggtgttgaagaaaagaagcccatttctctgatgtatctggcacacaatggaactttaaaggtgtagacctatacaccaaatggcacagttcatctcaaggacactgtgctgggggtgggcatggctctttaagatcactgcagcaggcaaaccgacttgtccataatttctctctctctctctctctctctctctctctctctctctctttctttttttttgtgcctcccacgtgtaggatttggcatattgtaaatggtagcctacacatgggtaaatgagaactgggaagataactaaatcccaggtgggaataaagtatacttgtaaatgaacaaaggaaatgtgtttctcctgaagccaagatgctaaagatacactttatggttctgtatacactcagcctttggtattcggctgcttcagatgttctaggtcccacttctgaggaatccagtatgtgtttcagctgtgattgaggcaggagacatcattcggttcaaaatttcaatcttagaaaagcccatgaacttgatacataaaaaaacaaaaacaatcaaactgcatcttattttcaagctaacatttaggacaaagcagatttcatctctgggtctttggcttccacgccaaagcccctattttcctctcagaagacagccataaaaacttagagacgcaaagggttccaagatgccttatgcggagtgccttcccaacggttccattttggcaaaccggcaccagaccccactccgccaagctcccatacccctatgtgagtgtgaagagagtatctggtcacaaatgatgtgggaaacaaagcagtcttttgcttccaccttcttgtgtgaccaggatggaacccgatgttcagagacataaagcaagtcacagaagggcacacagcaagccgcaaaggctcagtttctaaggcctctctcccctcaaagtccattgatctcttacaatgcaaaacaaggatagctgagcattcacaaaaaagctacaatgcagttcctttttcctgttttcacttggaggcttttgtcttgtcagcatcttccagggaggtgacttactgcatggagatttcacttggcattgtctttagcagaagcgatcttttcaccatagccagcgtttcctttggaggttgactccaattcacagaacacgtcctgacaatcgatgtttactaagttggctgtttaaatcatgttcagtccttggtgacatggactgttcctttgtctctgcctctgcctcgctcgcctttttctttgtgcttgacacaaaaggatggggccctggctcatctggatatggatcagtgtgttcccgggtaagccttgcaaagctacggagcaaaggtgttgttaaacgttagaagtcattcaatcacattccacatccgtgtgtctgcaaagtgagaaggaaagcactctgtgaacatctgtcatggggctgtgcccttgctcctttttaaagatgttgtattattccttctttgctggtttctcctttatggaatgtttgagattagtacacgcaccccaccctgccactaattctgggctcttatttcatactgaagtatcataacaaagtggtggtggttgttgtttgcaggagcccgtcaggatttattctgattatatttccctttcgaatcaccgacgggcatccacaggcattaccagataatacttactatgcagtagctatattttctaccctcacttttccagaagcccttttaggcagtgagtgtagaagtcagtgaagaggcttctgtgtgtctattctctgcttgccctaacatgtaaatggaatatttgagttttggagcagacgccatctgctggaagtttaagatactgcaacccagatttatagatccagaaaaaaactactagtctgatagctaatttaagtaaatactacttccatgacctcagatagattacaagctttctaacttactgtttggagtgtcaatatttgaagtgtattttttgtgattagaaaatagcttttcttttttatttgtgctcagcgttagatccctggactcttcatttagtttgcaggcacaagaacacaggttagattactgctcctcttgccagaaagaatagctttgcaaagatgcactcaggggcctataaaaatgaatcttgtggccatataagagaaaatgaagagaaagaagaagaggggaatagaattatgtgggcatgaaggacaatcataaaattgaaatcacatataaaactaaatacaagataaacagatccttctttctaggagggcctcgttctgagaaatctgcttaacaccccatactctctacactgccccctcactagagaggcagtaaagaacatccttcctagacctggcttagaattttctactgtagtcatattgggtagaacacctgttaagcctcaacccaaccttgggttttccctaggtggctgaataaatcatttcatattttgagactctatttccccacttgttggcataggatgaatgttcctgtctgaatatagctacagaaaatggaagaaacagagccagggagatggcttaggtagtaaggcccttgctgtgccagcatgatgacctgagcttgacccctgagcccacagaaaccctaggcatgctagtatactctcacaaccccagtgctggagaggcagaggcagaggcagatggatctctagagcttactggccagccagtctcaccaagtcaggaaactccagattcggggcatgaagacatcacaaacaaacccaaaacaacaacaacagcaaaataccaaagtgaatagtggagaaagatatccaggttgacttttgacatgtgagcgtatgcacacacgtgcacaaacacacacacacacacacacacacacacacacacaccagtggcacataacaaacaagttttaaatgatacactaattagcagcctctctctagacagtactgctttgacccctctaaaacacacttagaactaggtttgatctgaaccgtatttccccatgtacagaagaataccctaaaaaatgaaaacaagaactacagccttcatctggctatgaagtcctgtgggggagggtggactcgacccaggggaagtgttgagagacttatgtgttgcttctcttccacatatatgcctaagaaggcaaagagctgacaaaataccaaatagaagcagaaagacaggacagatgtccccaagcacactgactggatgtccatgtgacttcctggtatgtcagtgtctcacatccaccatggctaacaaggatgctccctttatttcccgttcccttataaatggaacctcctgggtgaggtagtagaagcataactacatgggaaaatttgatagggcttttttctcctagttcatcccctgtcatgttggccattgctccaccccactgacaccctctgtttccaaacacccacacacacatattgcccagccctaaaggacacactgttggtgattatttataataagtctctctgctcttggcaggatacacaacagctgctggtctattctttgccacaaagaccaacttccttctgccccgggtgatgggaagacagtcatgcagagcaatttataactgtgtcccagaacctcgaatttgtttgtgtttatttatattgcttccatttctgatggggaattctgagatattcagcattcccctgtgggagaattctccttggagaagcctctggtagccttcaatggtcgtcttcattgagttagacattttaggactctaggctaaaggaagtagtgaccagtccttttatgagagttttagaatccacattctgtgttttgttaaaagggtgaatgtgttctgtgtcacttgaacaataaattactttgagttgctaaagggaagatggcttgtcttcatgagttccctacgctcacaacttaacaaaggatctgctcagtcgggactcgttggctagcctgggtagacggctgtgtagagctctgtctgcttggctgtcaggagccaccttgtatcacactcagctttaggccttgtcctaggtaaagcagagaaggaagccaatgttctaccatcccatcagatctagtaaggagagtcaaaacagggctaaagcttcagaaagaccacaacagcatggatgtcatgatcagagacccaagcagccctggaagtcagtgtggtcagcatctttcggttcttttaagggatggaagacacagagtacaggatatgcacctaagactgaacactcaacaaagatccaaatggctctcacctcactatcaatgcggtagtatgtaaaacagcctccgattaggctggccacaagtcagaaccatggtcaggaaaaactggaaaaaggtagaatgcggcagttagctatacctgaggttctagagtatggcaaagaggaggtccactcctgaccaccttgctttcttctgtatgagcatagcttgttacatatgaattgtggggaatttcatgtgtaagaacaagctctggtcagctgaccatccccatgatgtctgtgcctcttgggggattcgaaggcatggaaagcttcctggtgtgtgcctgcttagtgtgccctgagtgtcccaatgatcccagccctgttcctctgtgatgtctttatccttctcagcaggggcttagcagaggctcctggcagacagataaacattacccagaaaaatccttagtaaatgaaggcactgaaaagtctcctggtagttttcggagaacttgctgctcttgatttttggtataggacgtgatggttactttgctaaccggacacataggaggcatgcctctatgagaaatgtttacattaagcctctgagagtagccccgaggaattgtcttgaccaaattgactgatgtagaaagacccatcttacttgtggtggaaccatttgctgggcagaaaattctggattgtagaagagtggaaaaagatgggtgagcaattacccttgttctttgttcttggtgtatatgtaatgtgactagctgcttcaagttcctgatgctttaaccatgatggtccatatcaagaaatattagtcaaattaaccttttgtcttagttaaggtttctatttctgtgaagagataccatgaccatagcaacttttataaagaaaacatttacagggtagcttacattttcagagattcagtccactttcatcatggtgggacatggcagcatgatggcagatagggtgctggaagagctgagagttttacatcttgatttgcaggcaacaggaagtggtctgagcccctggatagggcttgaacatacataagacatcaaagcttgcctccaataaggccgtatatactccaacaaagccacacctcctaatagtgccactccctaggagcatatggggccaattacatttaaaccaccacaccctttctaccttgagctacttttgttggagtattttatctcagcaacaagaatgaagtgaaagacatttaacctagggtctcaagcacactggaaaaacactctactcctgagctacattccaagaaacgtgtgtgtgtgtgtgtgtgtgtgtgtgtgtaaaatcaatatgttaagaaagaaaaactgtatacttactgtttgtagtgtgcttaggacataataagtaaggttgtggtcacttcacatatactgcatgaatatacaatacctgcctggtgagcttagcctctcagtgctagaaacagatgctatggacttaggcagagtagctgtgattttatattgagagtggaaggggcaggactgatacacagactacgtaatactaccacgttcctacctttcagtgcctccctggttcccctgatgctcctgcgtgactgtttgttaaaacactataatgtagaaaataagaatgagttggcaggaataccttctcagaaacttcccttagcatgagcctatactaagggcacagaacattgaaactgcaggtcaggatatgagatactaggtttaggtaactcactgaaagagttactttgaggcagtttgcctgtatctcatcttcagcgactaatatgcagacagtaagactttacagaattcttgaaaagataaggtacataagcttcataatacaatattctgtaattaataaatattatctactatcgttagtaacattcagtctgcctgttttccttccaaggactagacgagaaagggaaccttgaattgtttctctctaatattttatgattcttagcatattataggttctaaataaatgttgcacagatggatggatgggtgggtgtgggggtgaatggataaatggatgtatggatggatagatgtatagatggattcacggatagattggtgaatggatacatggatgaacaggtaaatgtattgatccctggatacatagatgaatggatgaatgaactttaatttagtagattaagcactacagaaatttcaatatttaagaaccttcccaaggaatactgcttcacatgttacatgatggaaatcataagacactgcacccatctgcagaatccatcaagggagttcattgggctcaagtagatgtttatattcacaagactattgcgctccacctttgacaccagccttctcacaatggtaagcatagaaactctagagtccaagtcagaaacatcagatgcctatctgtagttagaatcctgaaagttcttaggcctgatggtaaggtgattattgggcaggtgaagaacctgactttgtttaagaaagttatatctcacagtcaaaattcttgtaagatccaaatgtatgccttgcagagtcctttctacatgctagttagagacttgctaaacacagggaagttcaaagcatagtgtccctattaggacttaccattcatctatagttcccctcatccagatgtattccaccaatggggtcaattttaccacattcaatgttgcctagtaacacaattgacacatatcatctttatctgtttctggaacaactaaactaagaagttaaccaacagaaagatgttttgttaactctttgtccatcatgtttagaattattcaaagctgttatttataacagcctgagaaaaccatcaaaagcccttgggaagaactcaccctccatattttacctaccacaaatatgtccacaggtggcacaggcacagttgtgtttgccagtttgtccccttcccctgtcaacccagaggggagctcagtgctgcttaataccatgcctgcccttcctcttgtcaacagccccatccttaaagaccaagagtagctgatgctctagcagagtgcttctcaaccttcctaatgctgcaaccctttaatacagttcctcatgttgtggtgacctccaaccataaaattatttgttgctacttcataactgtaactttgctactgttatgaataataatgtgaatatctggtatgcaggggttgcagcccacagtctaggaactgctctggcacatatcctcatgtgtaaaaacacagggggtttctgtttcactggtcctatttgattgaacagaggagctcagccctgagcctcactactaaaggtctttttagtccttccctttcttacatgctgttggggtatgaaatgagatcaaaatagtagaaagttgaaaggatcccagtaaaagatctaagatggatttaactgttctgctagagtgtaagtgaatgccaaatgctgttggctgggagccaactgacttgtgaaaagcttgaggaagtcctcgcttgcattttattagccatcaagtatctttgtaagtggttaaagagggttttctattgttgcttgtgtttcaaaatgagaaacacaaatggtctggtagtctaaacatccatgaggtgatagatatgtgtattattgtattatttcccagcatgcagtgttttgcttggttctcttcactaaccatcaagtattatcaatattttgctttgagacagtttcactctgtaatgcaggctagcctcaaattcacaacaatcctcctgcctcagcctcacaaatgctaggattgcaggtatggcccatcaagaagaattaactctactcctcagtaggaatcaaagctcacagaagctacaagtcctatctggcttcaccgggaaaagccttaagtaagtcagtgaagtgttagtccaaaaccagtgttcttgttccagcgtaccctgtggagagatagtttatgatcannnnnnnnnnnnnnnnnnnnnnnnnnnnnnnnnnnnnnnnnnnnnnnnnnnnnnnnnnnnnnnnnnnnnnnnnnnnnnnnnnnnnnnnnnnnnnnnnnnnnnnnnnnnnnnnnnnnnnnnnnnnnnnnnnnnnnnnnnnnnnnnnnnnnnnnnnnnnnnnnnnnnnnnnnnnnnnnnnnnnnnnnnnnnnnnnnnnnnnnnnnnnnnnnnnnnnnnnnnnnnnnnnnnnnnnnnnnnnnnnnnnnnnnnnnnnnnnnnnnnnnnnnnnnnnnnnnnnnnnnnnnnnnnnnnnnnnnnnnnnnnnnnnnnnnnnnntgccatctctaaacacagtagtttccccattagctttaaaaagtatgttcacttccttttgttgaaagaaagagagacagaaagaaaggagggagggagggagggaaagaaggaggaagggaggaaaggaaggaaggaagacaaccttactgaaacaaaattgctaagtttagatgaaaatatacacgagacaaagaaatttcatttgaaatttctctgctccatttttattaccttttctgaaatggaatttataatatgaatgaacctctcccccaaaagattctaaaatatgaagaaaattaaaacaaaacaaaacaaacaaaccaaaaaaaaccccaacaaatagagcctatagtggaggttctggagtcaccattctgcatcctgccttgccatagtcctttttaaaggaactagtaactacaactcattacccatctgaaagacacgctgaatagtacacagacaggttccaaatcagtagaaagcatttaagatcttagacacatcgctggttcattgtagcggaaagtctaatagcctttccaaaaatttcagctatatgtttggtctacttacagcgtgcttgaacacatattcctgccaagatgaaaaaagtgaaactaaatccttccaccatggctagcacgttcccacttctttctgattaattcagatgtctgtgccatgagagcattcaaaactctcaagcagagctctaagttaggaagtatatttgtcaagtaaatgctaaaacttgcatgaagggcatagagaattagtaatggtacgtttaggacataaaaatgtgtgttttcttatagtccacctcgatgtaggacaaggtaaaaagaaagcaaactccagttctgtcagataaaaataactgtttctttaggaagcttgaagaaatccactctatcatgcaattattctatgaaagtgaaggtaatgaaattttaattaacttcatttccttcagcttctcttatgttctctcagaaaatagccacatgaataaagtgacctacatgtgcaaaaatatatttaaaataatttagctgcctgaattaaactaaagtgcaaaggattggctttctcagaaagatgagatggatttcatcagaacagcaccgtcctaatcagctgtttgttttcaaacatcagtgtttcatttatgcatttactttgctttctttgatggtatgattttatagcatgcttttttccctatacattcttatttctcaatcaagatttcattgttttccattaacttgtagaaattaatctgacttacccattgaataaggtgaaataatattaataagtgtatatataacttagtaatcttttaaacgtgggataccagcccagtgagttgactcagtgggtaaaagtgcttgctgctaagcctgatgacctgagttcagtccccagaatggaataagagaaccaactcctgtaagctgacctctgacctctacatgcgcatgacggcacatataggcctgcatgtgagcacttgcacattcactgtcatgcatactcaaacatacacacacacacacacacacacacacacacacacacacacaataaagtccttgtttagtgggactcctttttgtaatgacaattgtccagaatcctggagtgctgagggtgtcacagataggatgtggagttggagatcttacggaagaggtcagaaactctgaaagatctcagattttcaaatcatgtatccactatgtcaacatttcctgcaacaggcatgaaagactccagtcattcctctcgtaccacattactgcttgatttaacaaatcacttgtcggtacttgatggagacatctccaggataaagaaaaagagcaagccaatagcattgagtgagcttctgtcggcgtgctcctcgatagtgaatccccaaagcatccctgtaaagccagtgtagttatcttctctgtaaaataggaaacggggttctgagatggagatgagtgaatggtccaggggttcctgtccaggcagcagagcaggaatctgagataaaactgattagtcttggaaatgggaggggagttggttaagtagcaagagtgaataggggcatttggggaggagagcattgatttaattttcatccaacagctattgtatttgatgagatatttcatgccagccctgtgccaggcaccaggggaagtaggagtaaataacagttaacaagttaacagttaacagttaacactgtgctacatgggagcttggctttctgtctgttgggatcctctacaagggtcttcatatttccattgtatgatcctgccatagcctaagctctttatcaagtataacctagtaacttcattgtttgatgaaagtgaggggctagatatttagagagaacagtagggtaggctccaaaatggagttcctttagccttcctggcttaaggggaaggtggagggtgtggggtggggggaatggacaggatgcagcaaaacaggtgttgcggttgataagtgtcccattttccactaaattttcccctaaacagattctctcatttaggagatattttgcaactgattttgggagacagacagcatgaggaggtgtaggtagaggaaggaaagggaaggaaggagcctgtcttggttgacctgtgtttagagccacttttgatctccccagggactccccaccaccaccaccacacacaccctcttgtaaacagtgacagtttgcttatgctgatttggaggatgagactgatctttgtattaaagatgtctccagtcacttagagaggtcaggccactttgcagggctgagtccttgggccttaaataaaagggaggttgcaaaatccaaggtgaaaagaaaaacattattctggcataagcagtacaccattcatagttttgcaactagactatttcgctgacaaagaaaaatgtatttttaagcctgagttctaaaaacaaaacaaacttccatccctgccctgtagctggcctgtttctgccagctcctcactctgaacacaaacgcattcttgcacttcccagtgctcaaccagctttcagcaaggctgaggccagcgctccttctgggctccacctcactcgcctgtgctgggggaggggctctcttgcctgctgcctgtccttcccctctcccatctggctccctgcctgttgccctcatcaagctgtgctacctgccaccaggcaggaggaccaaggagaatgaaaggattctattcttaaatctggaaagctagggcaaataaaaaacaccagcagaaatggaaaaacagaagtgggaaaagctgatgcaggaaactctagatcgcttcccgaagctccattgagtcaccagtttctgtcttgacttatcttctagcctgaagaagggttactcagtgggcaaggaccttcagttatatgggatatggggaagaggaggtccttttggtgaacactactagttctgtgacccaggacattacataggaattcaaatcattttgttgcatcccaaaagatgtttcccatatgtcgcttttttccccttattttcctttagtgtggtagctttcatgtttgtgttactttccaaagtaattaaaaaggtaaattcccttagtatatctacacaggactggcttgtttatcccaaaggaatgaagggtataacttgatgggtatctcctttcaaaactggtcattaatgacaagaaagagatgttgaaagtgtaaagtcctcaatctttgatggcatgagagaaaaatctttttttttggggggggggttgagacaggatttctctgtgtagctttggagcctatcctggcactctctctggagaccaggctggcctcgaactcacagagatccgcctgcctcagcctcccaagtgctgggattaaaggcgtggcaagagaagaatcttagaaccctgagcgtgggagggaccagatgaagaagcagaggctgcatgacagcccccaagtcacaaggtgagaaaatgccaggtctgggtgcccacttctgttctcttcccactgtgcatgcatcctgtaattcccatgtacatctttttgtgccaacattgtagataaagctctgcagaatctaaccaagttctgtgacttaacggtcattcacctagaagatctccacacagaggtttctctaagcaagccagaaagaggttttgcgtcctacacagacatactgtctagtctgtgtcctccagcctggccatgagggttgcctgctgaagagcaggctggatatagctcaactctgaccagtcccctgggtcagtggctcagatgtggggaacacccaagcttctgtcctgagataggtgcccatatatcaacctgggcagacacacctgacaatcaaatactgggaacgaatgtattctatggcagatgaagaccaaaagtaaaacatgggctcatcttcagggacactgctgcctttttcttttgctctcagcacctcatttccaaagtgctcagccatactcaactctgaacaaactacaggtaaacaaacttgccaatgtttttactcgactaacagctgctgtcccagatacatcttttctagatcaaaccattcttattgaaaacacactgtgagccaaaatgaaggttttctttctgtggcatttaaaatttaacgggaattcccaatccaagctcaacgctcagcgcacggcatggatttcataactgaataaagtgcaaaagaaagggaaggatgggagaagggcaatctcccacgaaagatggggttcaggcagtgggcctgaaagggggtgacagtgagagacatgataactagctccatgtcacagcagacaggccgtgtgtgcttggtctggtcctcacttcttgaaaaactccatgaaaaactgatgcagatacctagagtatatctctgaaattattttccagtagagaagtcctccctcttccccagacacctcagaactcctatgattgaagatatcccattgtggatagcaccactgtcctggacttttaccacaacctaagctttcagactccactgtgttatttcagaaacttccctctgggtaccatacccaaccttattccccatcaccctttcttattactcagctctcaggcagtgatggtcacctctgtgtactaactatgcgcccatagtcagtggcttacacacacacagtatggtaaaaagagaatccacagtgatggtcacctctgtccactatgagtccatagtcagtggcttacacacacacagtatggtaaacagagaatccatggttacaaagatgcttagagaatccctgtctgcacgcccctacgggaagtccttcattgttttcctcatgtgaaggttcttcctgtgtgtcttgatactgtctttaattgacagttcctagaaagaactgtaacctcagtaaccccagagctctgcttctgctttgtgcagttttgtgtgtgtaacagttgccctatggcatctcttcatactcaggatatctgtccagacagttgattgtgtggtgtctgttgctttacccaggagttagagggattgctcatgactctgctcttctttggctggagaaccttctgtgtttcacaccaattactttaccatctgtgcagcacacggactccagagtcttctcccattatatgaggaaaccttgtctcccaccaacagccattaaaattcatttggctcttcctcagtgtcccaggtggcaatattattttccttgctgccacttaagaactgtagaagcattcttttatgtcattccttttttgtttgtttggttttttattttgttttgttgtttttgttgttgatgttgtttttcttctgaaacagagtttctctgtgttgccctggctgtcatgaaattcattgtgtagaacagactggccttgaactcacagagatttgcctgcctctgcttctcgagtgctggaatcaaaggcattcaccaccaccaccaggctatgctattccctttttaaaaatgcacatgcaagtgtttatttagtgtgtgtgtgtgtatgtgtgcatgtgcagacacaggtgtgccacataactcgtgtagagatggcaagataactttctggaatcagttctcactttccaccttattgagtcagggtctctcttgtttgtgctgctatgctatatattccagacaattgtcctgtctccacctctataaatatgagccactttatctgccttttcaatatatgtattccagagatctcactcaaattgtcagatgtacatagctagcgttttttacctgtggagtcatttctctggccccagtcccttttaaagtacttcactgtttctggacagaatgtttgggtattcttcttggacctctgtgtctatagtctctcgtaattatgcttactctgtgtgagatagcatgacttgttagtcagaactctagtctatgcctgactttttgtgcccctgcttgtaaaaagatcctagtgccagttgcaactctttctcttccaaggtcaaagtgaaggtgaagtaataagatagtcaatccaagggaagatgtctttatgtgacccccaaggggccagccctaaatctaaggctgccctgcattgcagaaggttcagaattagctgataacgaacactacattatccgaggcttaactgagctttgtgatttgggtaaaggaaagagatggagaaatagcttcacagagaagcaagcttgagccagggaggtgactcaatgggtaaggcacttgcagcacaagaatgaggacctgagtttaaatcccagaacacacataaagctaggaaaggtagcacacatgtgtaagtctaaggttccctcttctctctgcctcccaagctcttggattataggtaaatgccaccatgatcatatctttacacgtgtgctggggatggaactcatgtcctcaagcttgcatggcaagtactttgtcagctgagccatctccccagcccaatttaatccttcttaatctagatcacttatttgaaatgcttgcatcttcaatcccaaattccaatgccatctcctccagaaagccgtggttcttctccaggaactctttattcagtcagtcactcaacacatttttatcaagcacctacaaatgctagataaacaaggctgaagaagacacacatgtcttgtgctgggctatggtgtttcaggatgataaagagacaataagctaaaagatgcatatacaaattttgggttagttggaaaacaatggagcaagataccgagtcagagaatgatgttctcccactcatggtaaaacatgggggaagcctctgtcttgtaaacagtgtgagacaaacacagaataaggaccataggagagcactgcaagtgggagctgcagcaggcaccctgtaacaaagcagacctagggtgtgcatttcatatgaacttaaggagaagctcaggtcacgagcatattccttttgacagggaaaatttggaatgattgaatgaccaaacttaaacattgattttatctaagagttcgttgtatctttaatgtcttgcagtttccttaaatcatcaatttctagtgtgtgcttagaagaatacaccataaactgaattatacaaaatctagttataccacacacacacacacacacacacacacacacacacacacacgcgcgcgtgtgtgcatgcacatgctagttctacagggagctataaaaatatgtatatgtatatgcatatatacatacatatatacatacaatagatgttgccaagtgtcagcaaaataaaaaatgagtttagaaattctatttcattaatctcttactacagccacaccccacccctttcctatggaacacacatgactactggtgaagactgtggagtgctgaagactacagtcctcaacttcttttatttctctattacagaatgcttaggtattactagactctaacagtttctcaagtaaaatctagatataatcagtatccaataacacagatttctacccttctcttcacccagttactgtcttttccaccgtcggtccaccctggctcattttactctaaagatcacactgctaaccaagctgacgcttgggatattttgtcatgtttagactgggagttaaaataccaaggggcaggtttttatattttccaataaacaaatttttgtcaaagaaggaggttcaggtgagagatctagatggtcataacctgggttctgtggatggactacactgaagtgacactccctctgggagcaaggatttatacaattcttgtttctgcctgtgtatttttgggctcttcctccttgtgtacttcctcctgtgtactcggcaaactgccctgagctgtgtgactgaacataaccttaagactgggaagttgccgcatcaattcgttcgtgggtctttgttccctgacggaagagctgaagtatttgttctttggttcccacccactggtagatagagatacatgcttctatacaagctaaacttgcaagcaactatccaataaagctccatcttacagttgtttataatgtgcttttgcttctaaatgcatgtgtgtacaggagaggggcagtcaagacgggattcctgaccttcgagacaagtttagccaaagattctacagccactggtgattttaaaagagaaaagagcaatgattcttacattgttatgggtatgacatagctctacaggttttaaagcagcagagaaaatgcaaagccaacttttttcctgagacattagttgctatgaacaaaaacaagccaagtttggtttgtgtgcagagctatcccagcatgcagctagcaactgggcaggcagcaggtcctggcatgggcccaggtagcttggctccctgcagcagtgcaggaacaacctagctgatgctaggctctgatcaaatttccagaatcagattcagaattatctgctcagctttcatgtacctaagaccatattttgtgtaaagggtttttgtcccctgggttgggaatggaggtgggaaggtagtcccttggtgctggtaaattccacagtagctgttatctgcttaaagacaaaatattgggagctcacagctctgtggggtaccactatagcacttgcttggtgtttacaccagaattgatgttatccaacatattcatgaactttgatatagaactctctactcactggcaaaatacgaaaggggtcacagcagataataaatccataggctaccactatttgctaccttgtcacaggcacctaaaatctcctatgctcatttgggttacttaccactactgccatttaagtgaccagccaagtgaccctgccaggcctagggacatgagcaagggtgatgactgtgtgttctctgccagtgctgtcctgtaagtgtttaagaggtatgacggctctaccactgcttaggtgaaaggaactaaagaggtctggagtgtttcagctcctcttctttcttctggggccataggcagcacacaaaactattctaccacacatttgtgtgcttccttagtgaatatgtcatactacaggactccaaccagctgttcagtgacagatttgttctttctttcctgtttactacatatgcaccatctcagagaagtagctacatttccacacaattcttcagataagcgtgatattctcttaaaccaaaaagagaaaatgctatatccactgggagtactttctattgtttttgttgttgtttttgatgggggggggttactcctttgatttggaattttgctcatgtttctttgaagattttctgtgacatttttatacatatttactttggtggaccctcattctagtccctcctggtatgctgtggaatatttgatcatactgtgacactcctagactgttaaataaagttcaccgtgagtcaggagcagaaccagtgactagctgactgcagttggcaatagagaagccatagagaagatgcataggaaggaaagagagggcacctgagtttggtgtttcttctggggacaggtaaagggatgggtttcgaggccaaacagcaaggtcagctggttgcttctcagcttctctgacctaggttttcatccccacatctgaccttctgagtctttattggtaaatagaatgatagagacttaatttaaacctacatatcacagccgtggctgggcactgactgtaggcctcggacagtaattacaatatcagtagattgatgagctaagccaacagaaaaacatcactggtatgtttgtgtttcaagacaggatatccttaagtagcctaagctagcctggaatttgtgactctactatttcaacagcacaaattttggataccaagcacatatcactgtgcaaccagattcattattgtattcagatggttcgttttctgatggctccatgtgcttcacatattccacaaccatttccacatttagaccatccctatggctgtgtaaacattagttcaaagatggaaaacctgcagaccagagaggccatgaaacctacccagagtctcaatgggagccaggacttaagacagccaggcaagcacattcctactgaggggagtggtctccccagcctaccccggctgttctaatgctagtttgtatctctcccttgcatttctatgaggagtttcaggacaaatgaaagccctcaagctctcttgtgtaaagaaagatttcctcactgaatctgtagaatctctgagagctgcatgttcagaaaaacacagagactggagagagtaggattggggcatcaccttctgtgtccctgtgttgtgaacttcttagcttctggctgcaattttagctgaagtttcttctgcagtgacatcggtagctttttcccagtgacttcagcccatccagagctgtgagctgccccgatggctgggattagcccagccttctgatcttccatagaatccacaccctccatgggagaacttcattcacttctgcagagtgcattgttcccaaaggaggtaatgggcatgcccaaaatacattgttaaaatatgaattacttacacttgaaacaggactctgtcagcctgtttccatacgctgtggtggtagaagcctatgtgctctggcctcccagctcttgaactatgtgtctcctttctggctagcacaagattccaagactctttgtcaggcaaactcttgattatttgggactttaacttcctcaaggtgtatgtcttcactcatcgtgtgaggctgcttctaaagccagatcctggccactgaggatggctcaaacaattcaaaaaggcaaataattcttagactctggctaaccaaatcttttaggtatcccacagtccctgtggtggcccagggcaaatactgaagcccatggaactaaatgtgaacaaaaggagccaacctgtgattagaccacaagctgcactcatccagtactccatccagaccaaaggtgactgacagttcagaacagtccaagtccagtactggggaataccatccactgtgtccttatgacagcctttaagtctcctcaccatgtttaaatcatttttaaacagttaagtatcaaaaaacagttttagtgggaggaatgctgggcactggtgaagagttttaggattttgttcctattacttttttctacttgtgtaaagcctttttatgttaaatgagaagctggtgaggcaaggaaatcaattgtaattaaacaggtcaattaaaaacaaagttttcagagttttaaaacagaagaatacatacacgcacacgcacacatacacacatgtacacacatgcacaggtatttgaacgaatgccctaattgctgactgtgtagagcacagagtaatgacagtcagactctgcacttcttggagccagtgtctgagtcatcagatatagggtaaccctggcttcccaagtggtcattatgttgtcatagagccaacaccacccataccctacctcaaggccacccaaagcagtagggcatttggggccttgaactatatttgactataattattacactaagagttcataatgcatttagcaaagtagattaagtgactacacttagtctggtttaagcaaaacagttaataaggaatattgttcttccttaaagaaatgaaaactccagggtgagtcaaccgcaggaggtgcagggctaagaataatgaggaagcaaagatctgccttcaaccctttgtaaagtgttttctgttcttaagtgtaacaaactcagccttcatcatctttgattctgggaacagtgtcaagcctaagaaacaattggaaacttgccgtgctgtagcccatcccctgctggtgttccaactggatccaaattgaatatctcttttccaagtgctctaaataacactcatgataagagctgggactcagccagcaaaacctggaggctgacatagccctctgtctccagggtttctaagagatggcccagggcatactggccatttggctctactaggatatagctctgccctccccctattccccactacctctttctctccccctacaccttcgaaaacagaaatcatatagtcataatcccctggggcccatgttttcaaaaccccttcttgatcattgacttggatcatgcacctgcaattcctgtcttcaaggaactcacttgaaaaactcctagaagagaagctattaccaaacattctttctgttactcccctgttagacattttggcaggcaatacagtggagagagggagggcatggttctctatcgtctagaacttacaacttagacatgataagccatgcagaaactacttcagtacaagactggactctgttacaaaagtggtagcagatagaactgccctcgggacaggtaagaatagaaagtgttgaataagaaaactgcatagccagcaacccaggctacactaacatagtccttgccagttgaaggaagtgcttacacaaaatgtcttaatttttatctttagaattagaatgtacttgtagaaaatttagggacatccccttgcttttttgaaactgttattatatatactataaagttcaccttttgtgaatattgtttcccaagtagtaacacctgtacaaacaagtaactggagacatattctattaagagaactttctcaccacccagtaagttcccatgttgcagtgaaatcatgttagctcagacactggccagtatagtacacaacactatagagtattgtgtagaactctgcacaagtggaatgagagtatgtcctgtttctgtaattacacagtgtctatgaggttcactcctgtggctgtgtatgctagtggttcagtgcctttaggtaagtggtatggagatattctactatatgagtatggtgtaacatttatcaattcaatcaacagctgagggatgtttcagttgctttccaatttgaattttgtggaaacataacttttcttttcacttgagtaaacatgtaggtaacccatgagtggggctggtaggtcaaattgtaattatatatatgtaagtttataagaaggtttcagactcccaaagttgcaccattttgttttcctacctactttcttgaacagtccagttagttcttattattggaggatttagaaacagggtctcactggaatggccttggctgacctagagctcagaaccccctgccccggcctctaagtactactgttataggtgaacatcaccacttccaactccagatatccttaatctgggggactgaaacacataggtggactgagataacaaaagaccatttctctacctcaggatactgatgtgcaaacatctaagcaactgctgtcaatatcacatctgtgctaaaagcattcattttatttagtgagtattcttgtaattttcccaagttgtacattctgagaaaaatcactaagagccattttggttatcaaatattctaaggaatgctcatttctttcagacacccatgctgacaaactcatggtccttacatggcccacagtaaagatactatatcatattttccctttcgtatatacatacacaagtgtgaacagggaaaataacacccatttcataggttcctataggacgagataggagatatagaaaagatcctcttacaaggacatatctttagcagttatttaatataaattgaagagagagaaaggaaacattacaataaaacgtggaagaaaaggcaggatgatgataatggcatcactttgttgaacactgacctatacttttttacatagatcatcttgctaagtactcatgataaccccacgccatgtcaatgggactattgtctccatgccacagaaattgtcacatttagaacaaatcccagattgggattattcttcatttctaatcgcctctactcctcaaacttacagtattgtgaggttcagaagaagggtggacacactgtgtgatagacctctaccattgaccttttaggacataaatgagtgtctgtcaccattacctttgggcctcaagtgcccttgagtcctgctttatacttgcacccaaggctcagtgaggttttggtggggtgtttctgctcagctctctgtctactcaactgcttcccctccatgtaaaactgcatgctgtgtagcactctgaagactgtgcatgtactcttccacccacagagccagatgctgagcttctcccatcatggcaactagtgtggttttcttagctattatgttcatctacacacttttccccaaagctgagtcacattaaataaattacagtggcttctactaaaaatgctgataacaatcattcccctttttactttgctttttcaggagatatcagctatctttggacttatttctcctctaagaatcttagagtgtttaaaaatattaatagcagaacttttttcaaaaacagtttgtagtgttgcctgcacacaccctgcttcctcccagacaggaagtggagttttcttgtagtcctgcctgcacacactctacttcctcccagacaggaagtggggctctcttgtagtcctgcctgcacacactctgcttcctccaagacaggaagtagggttctctaaatgacttgattgtcttcttccttcttttctgggggatgaggcatttctctgtagcacaggatggccttaaactcaccacatagcccaggatagccttgaactcactacctagcccagtctagcctagagatcacagtgaccttcctgtttgctgggatgacccgagcttgggctcttacctacaagctcaactcttaccctgatgtctttcattcccacagccctatcaccagcctctaagcatccagtgaaaatagaaggtaagagctgtgagccagtgaatgggtaacagtgggagtttgccatccgctgaggaactggtaccagagatatgggcaatgtctgctaacacagtccatttctaagagctgttctcattccatccttgacctatcttccagctggaaaactacatggtctgagtaatcctctatagtatgttcacaggaaaggacagttttgtcttaattatggcccatttcagaaactgaacggtctcccatgtaggcgaagaatccacagaagacaaccctagaaatctggctattgtctttagactagcagaatttttaaagtattaaaaaaaaattctcttagctcacggtccatccctaccaggggaatattgcttcacaaacaagatgagaaacagttaaaaggtaatttcctgaaatggtctcatgtggaacaaattgaaaatccacagtccttcaacagagaaattttttcattacttgatcttttaaaaaattgtttcactcttcacttccctagcagatgttacaaatttcagaaacagacaagggcctttggattgaaatgaaaaattgatctgctctaaaatataaaaattcagtaaaaaattgctggacagaccatgcccctggctttgcagatctctcttctgttttgtttagagttcatcaatcttgtaaatactgccctcaatgtgataaataacatctttataacctttaaaaaatggtccatgtattgaagactatggagatgggatgctgatatgggcatgatgtggaaggtggctattaatgaagcactgtcctcacaatggctgtggctgtttcccaatatgccattcttgtggtctccctcatctacataaattctctcttcacacctcctttctccattctaattctactgcctagcttaaaaaaaaaaaaaaaaaaaaaaactacattctcgtttattcattctataaatatttgagtgtgtgttatattctaaatattttggtgaccactgaggatgtgggagtcaaaaactagccagaagctccctggagtttagtggctaaaggggacaacagacaattaaataaacaaggggcaaaagtataagaaatgtcatgatgggaggaagtcaggggacatagttggggtactaaaccttaaagctaattttggggctgggaaagcacaccagagaagggctgtttaagctagactttgaaggtagccaccgaatgggcaggtgctatgggctgcaccccgctgagcctgtgcactcctccatgcggcacattgtctctggaagtttcttctctttcctccctctgctgactagaagacctcctttaagcagcatttttctcaacattgcctcagctgctctgctccattgatagatggacatcccacttttatgatcttcccacatcttttcttctcaagtctgagcagcagatgagctggcagtttaattaatctgtcaattttctgagggagtcaaatcctttatatctgattctggccttggtctcagttacctcagtgtaggggcctaacttttcctctgtgccttctcacttccttcccagctcagnnnnnnnnnnnnnnnnnnnnnnnnnnnnnnnnnnnnnnnnnnnnnnnnnnnnnnnnnnnnnnnnnnnnnnnnnnnnnnnnnnnnnnnnnnnnnnnnnnctttccctgctcagggcttaatggccacacctgctggtgctatgcctgcaaattgctagtgacagtggctgcctgtgtcttcctagggcctcttgtgagagcttttacggtgagtctgaaaatccttgatagtccattttagtggatttctgttgctttgataaaacaccctgacaaaggaatttaaggaagttcattttgccttggagtatgatgtggagaggccaagggggcaggaagaggaagcacctagtcacactgtacacccaatcaagagccacagagccaggagtgctctgctcttgcttactatctcattcagttcaggctccccagcctgggaatgttaccacctgcagtgggcagctgttgccaccataatcaccctaaccaagattgttccccactaacaggccctggataatccttcacaggtctggccaggtcctaggtaattccagatctcatcaaggtgacaactgagattaaccatcgaagccccatagaccctgccccactgatgggggtgcccatgtgtgtcctgctgagtcactaacataatctgtcctctaaggatgttggctcagggttcccaatgggacatcatgccagctgctcttgtccagctgcatcctggtgagcacatgggaatgaaaataaaaccattcttcagctgcctcgagatgacctaaagacaaaatacacaaacagtgactccatcaagaggcaaaatctgtcacctatagctggtagcctaccaggcaaggcacacttggtctgcatgttgactgcagactgagagggaagcattgaagaaaacctgccccataggtatggagcagcaactggaatcaggttttctcattagctgaatgtcctcccaagtgcattccaccaccctctgcagggtgctccatccttatcccacctgattttccagaactcgctatctcacaagtgaagtgtagccctaccatctccctctcctttgcaggatctcttgagtctttattgatgatgtgacaattgtctgtttatagttgaatacaaagagactattctcttcgattttaaggctaaacataatactaaccagcctgatccttccacccatagcttccaacatccttcttaacatcacatgacctcattcagctaagcctttcctaataggctaaatgcttcttctaacacagatgcctcaggtccctatgaggccctgccatcttcattgtagacaacattagatacctagtctatttcacacctgagcaaataggcacagagtggttaattgatctgtctcaggacaaacatctgcactccaacccttgtccttctatctctccaccatacagttctttcctctgcagatacacatggggacttcagacaggcaagggacagagtgacataaatccaacaactgtcacatatgctgacaggaccaagtgactcttgtcaaatcagctccccctcatcctctgctacccctccctgctgagggaaaaagcctaatccttctagaacttgtctgctctctgtaccttaatcctgaggtgccatctgttatgcctgtggacacagatacacatggcccatttaactgcagtgactcaggacagagggaggaaggcaagaaactaggacaccttccctcactgtcacagactcccaaggcttcagacagacccagtacaggggcttgagatggagacaactggcacagacacccaggagaaggggcagtttggtcagcaaaatgaagttcaagagcttcttcaaggtgttctgagccacaggtgaatatagggaagacaaaccagagccatgactgctctcacagcagtctttggtacactgggcaggtgacttccaggaacaacagagctcagtggtagactgttggtctcaaatgggcaaagattgccaaggggcaatccccagcaccccaaaaatccaagacacagaattttggtccctcttctagctggcataggaactgtccagcagctctagaaagtgggtacacagtaaatctgagctgtcgtggatttcaagagttcatccacttagctttagccctgtgtgtggcatttacatcccagggcagcttatcaaacactcagtggcaccagccgacctgttaaccaaaactcatcagataggactctgtcttataacaagatggcaaagtgcttcatgtgcacattaaagactggtggagcccggagcaagagaaatcactctaagataggtaattttaatatggaaaaggagacctttatgaatctgagtcatgcggttccagtagggaggacaaggaggactcaaaaccacacagaagacaccagagtctggggcagagagagcggctgcagagaaaggaggaactgatgctgggccatgagatgcttgtgcttttacccacttgtgcttggggaaggtctttctgaactttgctggcctttgtaggggtttggtgtgaagtgacattcaaggagaatcgtgtctgtcttcttaaccaggtgacatctgggctcctttgtcaaaaatatgaagagaaatttacagtctagcaatttgacagctctttttctcatttatttgtgggtgggttgggggggcagacagatttctctttgtgcctccagctcatagaaaacaacacagagacttatcattaactatgaaagcttggccttagcttaggtttgtttctaaccagctctgataactcaaatcaacccctttctattaatctacatgcttccacgtggctcgtggcttttacctctcctcctgagtgtcctgtttcctctctgtctcctctggcgtctctcctgcacctagatttcatctcttcttccttcctctctgccagagaagttccacctaagctcttcctgccttgctattggccattctgctctttattaaactaatcggaagatgccttggcaaagacatatctccacagagcacaaaagattattctacagcaggagtgcacatgtggaagttaaaagacaactcacaggagctggttctctccttccaccatgtgggatcccagaatctaatccacatcattaagcttggcagcaagcacctttattgctgagccatgtcaccagccctggattgttctcttaaacaaaagtttacttcctagatgaaccaacattacaatcagatcttttaggagtcatgtcgtctaaatgtgacccatgccttcagctagacagtttccagtagcttatcagcacaggtgtctgcttttacatatgttatcattagcacttggctgctgaagtaggtataatggggacttagcaagttgtattaccttagcccaaagaaaatctgatatgccaagagctacttttgaaacaagtggattcgctccataacatgttccatatgtggctaactattcaatagaaaatttgtctgtgattgttagagttcattgagcaggcacttctacccagaaacgctcccactgaagccattaccccttgtcgttaggcattagcagcccaatctgcaggtactatattcaacacagtttctgtaaggattcaggcattatgctggcctgcccttgtcacctggcagaatgcactcaggcagtactctggtcagcaaagtgttccatgattgtgtagtctgcacataggtacaaaggacccctttaaaagacagacccctgcccactttgctctcttttccagttctctttcactctcctctctttctgctctctctttcctgctctcttccccactgttcccctgggtcagacaggacttttcctgtctccctcttctcttctgtcctctctctgtctctgcatctctttacctcttttctctttccttccccctccctcccctttctaatacaacttctcacttaagctctgtctgcctggtgtgtttgtcccctgcctcagccaaccttgcctaccatggaatcaatcatggtcccctatgcaaagtcacccttcaagctttattataacagtttctgtaaggagagtgtcagcctagattatatagatatgattgtgacttcactcgtcacacttactaatattatcctaatatactaaattgtatatattacaaagcagataaaataagggtcacaatttatatcactaaaatatttcccatttcctctaagttaccgtcataagcacatgaagctacctcttacaaacagcacccttccacatttagttgtcatttctcatttttctgctttacttttcagtggcactccttaaaaattttacctcaaactccttcttcccacacacttccctcttcattttatctcagtcccactgcaaacacagttttgtctccagacctaacacaagagctcctgctaaagccagggtattgattttcaagttcatttcctatatgctgtcttcctccatccttaggtagctctgcatccatccatcaccatcttctgacaacctttccctattcatgttcagggcccctttggctggtttcttctttatctaccagacttaagagatgggtcgtattaggtgatagagaaggaaagcgtgcaggcagaacaagagtatcaaaagaaggtataaagttaattgttttcccagtttcaactctgtaatggtgtccttttgttgtgaatgtgtgtgcaaaaatgcaatagacagtgaaagtgtaaaaccctaagcaaagctccatgatacagtgtgcaaacagctcaacaggtcagagtgtcctttccaagtagctcagtcggactaagcctcttctagctcatctggtctctgcttcttgtagtcagctcagctgtctaaacttctcctgtgcagctcagcttttctgaggttctttgagcaggtcttgtgtgtgcttatatatgcttgtgagggaggggcctagtaaatttgttcagtttcagggacttcctgctgctattttgagtgtttacttcatgctcttaaggaccttccaggtaggatagagccattcacctcccttagaacatcctgttgcttcagaccccctgtaatattcctgttgtttcacctcccttttttaaacattcaatgttttaatgagttccctctaaaatagaaggttttaatccccaggaaactgctacccaaaagggatcctttccggacttctttgtctcacaccccacatccagggcatcggttagtcactatttagcctttgaactagaaagacacattacatcagttagaacataaaataataacccgaattgagtcaaaatactcagattggatggttttaaaatatcgtctgtgaccatctcaaaccctaaactcatccttctacagtccagcagtttttcctcacaggtcactcatttttctccacagttccaagctcactggtttaaaaggtgattctaggaggctctggttaaaagaagtttgctttctgaaagggcttgtcatcaaattgctgtgggctttatgaatccctgatacctctgtttccagtaatgaggtggtccttctgcttggtttctttattttttacttatatgttttttataattgctcatgtgaaacaatgaattcagatcatacccacaccccactcctgtcccagtactgttttctccctcctcttactccttcttcctgctaacccactgagctcagttagtgctcagtgtatgtgcagagggtaaggccatttcctgcagtgcaagcaacttaggaaagaccacacccctaagaaaagggacaccccccctcctgcagccatcacctgtcaaagttcctcagttaggggtgggtctcatgagcctcccctgtgcatgctggggcattgactggcttaatcttgtggcctcacagcattatactcaagggggacgtactcaacatactctgctatttggtgtcctgctttagcttttataaaactgtgggtgtatgtgtcaaaatctgcttctggaaatctgtcattatttaattctagttcatctgaaagagaactgaaaaaatgtaaagaaccctggaggatcacatcctctcaaggttaaatgtcactgtctattgggaaagcagtatgtttctcttgctcatttttgttgttgccattattcccataacctttgtcccttatccttcagaaattcgtgtcttgtaagcaatcatcccatttcatttcacccccagttcacagggaacacagtcacatcagaggttaaaagtgaacgaggaactcttcaggtcctcatggtatgacccagcaggacagataaacagtgcctaagctcaggaccagaaacacagaaagtagatcaggatgtcactgtgacatttgtcacctgaggctacttaccgatgctcgctcacctcaccctacggctctactgtcttgtgaaatagaatatttgaaagaggattcctgaaaatcatttgattgctgttcagcttgatgtttcatcagcctagtggctggttccagacagaaatgttacagaaggtaagcatgcccactcacacaggactgaagtctatcaactcagcagtgataggtaaagggaacagatttccaaggttggagaaaacactgcttaatcgatttcttcaactgttctcgagcttaatctagtaagcagatgtgatatgaacggctcattgtggagctctgggtatccattcagagtctgccaggctcggaatcagagtcaggacactgtgagcagagcaactgtagatgccgagagcattcagaatgagaactgagagaaggctgcctgagtatctcttcaggcatggcacagtggtgctcacagacaggaaatctgccagactgcctccgctgaaggaacacgtgcagccaggaacaaggaaccacttaatgattaatcactgtcaacctttgttctggttaaagacgcgattgttggacgaggcttgtaatgagggactgttcagtgtctgttgctatgagattgcattcgttccctgatcctcagtggctgcaagcctcagtgctcttttgccagagtggggctaacttgaaagtgttgctacagtgcctgctaggggtgcaggagaagcttggaaagatctgctcccaagcatcatgccagagcccaagaagggacagttaatcaagccttaggcttggttcaactttgacatgaaatttttaaccaattttagaaatctgacaataagtgaaataggtaaagggaatttataaaagaacagatagacattcacccgaagtatatatgaacaaacagtacatgtatgcacatctttttcagcttcaacaagcccacagtcagaaatcaaaatgtaaaccgatgtcactgttcctgctatcatctatcaataagacattgaactgtggccaaattctcccttgccaggttccataagaggctggggtctgccttgacttgacattctctctctctctctctctctctctctctctctctctctctctctctctgttttccaaaacagggtttctctgtgtagccctggctgtcctggaactcactctgtagatcaggctggcctcaaactcacagaaatccacctgcctctgccccccaagtgctgggattaaaggaatatgccaacacccacctggttgacattttcttagaagttaaggaaaagtaattatatctattctattgttgattagagggcattttaaatcttcattttactaccaagaagcattttaaggaaggaaaatacagtatttttaaattcaaaaaaattattcttctgggttaaagtaaacttataaagtgagcattattgtatgatttttctaagatatactcttatgtgaaattatgaatatggactacctagaagtgtgagtgatactttcagatgaaatctgacaaagcaacctgcccacccgctttctctctcctccttgctcctcccttccctccctcaacaagtagatctggttaccattgtttttatgtgtctgtaaaatacaacttattgtgttttataacttgattataattgttagtgtcagagtgccacccatcccttttgcttaatccagctatagtgtgtaagacccccccggaaagctcaggccaccaggatctcagcccaggaccatggtcaccccaatcaccaggcggattcgaaagcttgatgcaaactgcacgaggctttattgttgtttaacgagctaaccccatgttagctggggccttccatccacccaccatggtggatggctaggaaagacagctctaagcgtctgcatagagatcttgtagggcagcataaggggagtgtctaggggtacgcacaggctcaggattggtgtggctccaggcttggagggctttgccctatgttgattggccaactggttgttatggcccataggccctcccagggtggtttctatgctctgtgcatcattgctgtgcccttgtccataaagcacacccagagccgtaaagcatagcaccactagctaacttctgattggttccttgccatgaggcaggcatctgacctcttagtgaccaaggcaaggtcatggcaagcacgtgttactgtcatggctgccgaaatggggagctggtcccttcaagtgtaatcagagaagctgagtaagagccgtttgggcctcgaaaaccatcagaactgcagtctctggggtactcccagcctccacccagtctgcaggtagccacaagctcttcttttaacatcagactagatcctagctatcccagtgttccagaggcttgtagaaagtaaatcaatcagtcccagtgtctcacagtagatttactctaaatcctcccaaacaggaaagattcattttccattctcaaatatctaaatagaacccattttccttagaaactattcacaacctataagcactgcagctttcattatcttgagtttatattcaaatacatgttcatatgtaaagagaggcaagataggtttttctctgaccattattgatgttatagtgggataatataattaagaaaactttgcaatgataatgggtactgtaactggttaagactttctagttggcagaggatagatcaacccggatgctacccctatgtacctgcttttgttcagggaatggcttcccctaacaggcacttcataaatcttggtaggcctgactgatttcctatccttgaccctagatatttacatgaaggagcttgaccactgtacaatgctggtccttgagcacatgtccttgaacactgttttgaagcagcatacctaaaatctttaggagagttggaaaatgtatcaaaataaatcacttcatacagaacactgtgagctattatttgcatttaaatagaaacactacatcctctctttcctgtgacaaatgcccactggtgaatggccacactctgacttccctaagaagtaactgtatttatcaaagtccatgtttccctctaacctctgaacacttgtggacttgtaagtggaacagttctttctgataatattaaatgtgactgttaatatattccccacataccaatagcctctttctgatttgtacgagtaataactgtagtaaaattggtgaaatcaactaaattatccagaagtgtagtgttttcctcaggcaaacaacaaccatccctctatttcttatgagcaagacaggctaaaatctaaggacttggcaaagccttgagattaactgcatcttgataaccaaggaaaaagtaatgaatgcaagcttccagaaggagggtgaagacagagagcaagcaatggcaccctgttgcagaaggactgtagtctccacaggcctgccattgtcacagtcggtggtattcacttacctgaaaccaattgaattgcttttcctaacacggtaaggctaagaagtcacattaacaccacgcctaactgtgttgttttgtatcaaaacagctcaaagcacgtaggtttaattaactctcaaaatattcacatgctgcattttaaacacagagagctgaagctggcctggtactttgaaaacggcaacttttaaaaatgatgctgacacccagtggtgtagatgaagccgtttctacaagaggaaagcagaagtgagtaccgtgggagaattagatgagcgccatgatccccagctaaaaaatctattaagcaaatcaggccctcgggtgagataatccagctgtgtcttgctgatgccaaaagaaccacagtagctgatgtagttaatttaaacattcttttcaaaccaacttttttttggcactatgcatgtatagtaagtagttgctattaagctccatgatgtccaaagatgtagcatttcacaagcttggcccaagctttgctaatcttatggggaactgatgagttgttgtttttaatttttctgttctgtttccatctaaggatagctgagtagcaatagttttaaactctaaaaggatcccattggctccaatttagtcatagttttgatttaactgttagatgtatagtaaatgagctgttgtttggatctagccagccaccaaggagttgcagcagaaccagttgtatattctcttcagaagtaccacaaggagctggaaagcacaaaagtgtgtaaacactggaaattgcacagtgtatcagttttcatgcattctctcctgagcggcagttaggccacaaacgtgtaccaggttgaaaaatggctggacagttccaggtccagtggagaatctgttttccagttacaagtaacagaacccaatgcaaccaacctacccaaaattgctaagaaatgggggttacaagttcatgtccacctgtattgtggagtttacaactgaggtgttcatggtaagcagaatgatgtctctcagatcttttattgagcaactactgacattccaagactggatgtgataaccaacttttgtatttgtaattttaccaaaagttttcagtattcatgttactttcttaatatttgggtaattgtgaattatgctctaagtgaagtttatctgatttttaatcaaatgcttacctgttacttatttgacaaataatttcaagtatgaaatttctccgagagattcctaatcctattactcaacctatcttacacttctcactcttcttttctagagttgtagctacaaagtagcagagtggacagctgtgcagttgatttaatcaaaatagctagaaaatataagaccaaaaagtccctgtccttcctcattattggagtagatttttttttattcaaggttattatttgtctaaagtattactgtgttaccctgcacataaaaacatatttgtatcatttgcataaataagacttggtaaataacctgattttctgggaactgattcaagagaaatctcaactcttttgaagtgtgtcccttagagttttaaggagaactggcttgtttgaagtcccattgaagcacttagtggtttctttcctaatccagggaagacttctgtgttgtgtgtaacagagaacacatggctccttccgacagtcccgtgtggccattataataaagcactcaaagattatcaaagacactgtagaccacagagacattgaccagtcagtgcacattgcttgtgcctctgtggttccataacagtaaatgtgacaatgacaatgaatatatgccccatttctcttatgagcaaatacattaaaatgtgtagattattttagattagttttgcacattttagtacaaaatggagaatcaaggcttaaaagtgatccctaggaaattgtagggtttaaaaaaaatgtgtgtttttttttttttttttggattcttttgtacagagccaaggagaagacagacattatagaaatttcaaaacactcacttaagaagttaataccagagctacacaattccacactgtgctttctgggatttatgtgtgtgaatatgtctggcattcagtttatgtttccccagcattttcattgcaagcctctattcatttacaaaagaaaagccacacttttttcaccctgcccattggatcaacccattctttagaggcaagagctttgttttgctttggtttggtttgttttttttttgtttgtggggtttttttgtttgtttggttggttggtttggttttttttttttttttttttttttttgagacagtgtttctctgtgtaggcccaggtgtcttggaactcactctgtagaccaggctggccttaaactcacaaagatctgcctgcttctgcctcccaaatgatgagattaaaggtatgtaccatcactgcccaccaatagaggcaagagctttgcatgaaatgttattaatcatattttagactcagctaagaaatagaacttgaattgttttctcccaatagcatttattgttaacttgagtatatacaaattgaatttcaactattctgccgattagaatttgaagattataatctaaactccacatcttaaaaattggaaagtataaggtcataaagaaagtctaaaattaacaaggttcataggttgcagggacagactcttaaaggattgcacttatgtataaaaatgccttcccttgatgcctggtgcatctgtgctgcagtgttaacacactacaaaccctgtctcttacagcaactgtgaaatgcatctctcctaattcaggagcctgaggaatataaagtcagggtaccaacatagatgtctgctgaggcctcttccattggtggcttcttcactcaggcagacagaagaaggcagaatggaatgaggcaattcctcttaaaagggactccagtcctttcacgagggcagagccctcatggttccactatctttcaagaggccctaactcttaataccagcataaggctaaagtttcaacatgagtttgttcaaatgtgtgctagctgggagtggtggcacaaatctgtaatccagaattcaggatatagaggcaggaggatcaggaattcaaggtcagcttcagctacatagtgaatctgagaacagaacgagaccctagctttaagagacagacagacagacagacagacagacagacagacagacagacacacacacacacacacacacacacacagagagagagagagagagagacagagacagagagagagaggggggggcacagctgtcaagagcatcagctgctcttccaaagacctgggttcaattggtaacacccacactaatagtgatctgtaactcaggcccagaaaatccagtggcctccattgagacttgcagacaaaacacccacacacataaaatgaaatgaaaacaaataacccccccccaaacattacattccttgtgaggcaaaggctgtaactgatgtgatcatggagcccctcagcaatcattcaaggcatcgttagttatttaagggaataatgtcaacaccatttacaagatacagtctaccaaggataaaattgcccacaaacgcaaccttcccagtcttgtttcatttggtagaagcagaattgataattttaattatattatgtgaaaggaactgaataattattgctcattggtgtctagctagtatcagtataaactccacattgtttagtcggttgtcatgtggttcaatgacgttcagtaactatcaggttaatttaagcagagagattaatgtctatctttaattggattcataccaaaaactttactcactttgtggttgtctggtcttcaaattttcctggagatattgttaaccccatacatcttgttgacttcagccagttatgactgttgcccacctttcaaatggcatttaggacacagaaattttctaaatattctgtatattatcaaactcatctaccttttagaacaagtttatttttatctcccggtctttaaaattgggataatagtggaaatgcagttattgcaagagttaaatgagatgtcaagcctttgatacatgatctgggcttctagtttacaaaatctgacaacttctaataggagtagttatctcaggttgaacaacaccattctcaccactgttgtcattgctgaaggaaacatgagctctcttgtctcccacgcttgaagcgtcttttcacaggggctctctgtgctaacacactcgtttataaacactggaattaaaaatgtggaccctactcctcacaataggttgagttgcctagccttgacacatggggaggtgcttagtcttactacaactttatatgccatgttttgttgatactcgtgggagacctgtcctttcctaaacagaaacggaggagggatgggttggggtgtgggaacagagttggagggactggggggagagaagggaagggaaactgtgaccaggatgtaaaataaataaagaaatgtattaaaaatttaaaaaagaactggtttcaccctattctgcagttctccagttgtcactgaagagaattagcacttcaacaggaagttctgtccttgtttctctctgaactgcttccttgttcattcatagacatgtttaaaatcaacaaccttttatagggagagtccatcatgcccagggactatcctgatgaacacagccatccaagcacattgctagaagacagacttagtatagactaaggagccattgtgctactgggtaacaaatactgtggcagaagctagtgccgtttgtctcagacacagaagaacttcacctacctcagctgtggggcatcctgatagacatttgagttgagcccaggaaaagttaacatcagctgggagtgaaaggcagaggaggaatattccagataaataggattagtatgcttagaatgagaaatgtccccccatatgtttaaatgcctagtctctgactgtggctctgtctataagatatttgttatgctcagaaacaaatatttggtgagcagagggtgaacttcacaacctgaggtctgaagatggtctggacacatttggagaaaattataaactttctgaaacaatagacaaagttgttgggttttgtgtttgtggaggtgagaggaggggcagaatcggtagctttgtgagatcttcatagggcatcacaatacataatacataatacaatcttttggacccactgctctagaaacaaagagctaaaagccaatttacaaagcagaagtttcatttccaccacaaagagcccttctaaagctgaagagtatctcatttaagaaaaatgtctcattccttcccccaagtgaccacatttttcccactccaccctgacccactgatgttctgttcctggccacagtccaccccagttcctcatggaactgctctcacagccaacccataataggtgtccaccccaaaggctaagaatagacacagtgtcctggtgacttgaaaattaggcaatatctgaagaaagcttcatttccatcagtgaaaccaaggagagtacaagtgcaggctcagactttcctcaggcaaacaacaaccatccctctatttcttatgagcaagacaggctaaaatctaaggacttgcctcaaaggacaaaggaaaatactaagctccccttccttatcaaactcctccaacaccctaccctgccctctccaccatacacacacctaaagagctacttctatcaggcaagctgaaaatctcttaagcaaatgaatctcttttttgagattttaaaaaaaatggtgtgtgtaaagcaacagaaacagactcaccaggttgtatttgtatacctatgtacttgtttatatgatatatatgtgtgtgtgtgtgtgtgtgtaataaagtaaaaggcaataaagtaagatggtataatggaggtacatatgaggagtttgggtagtgaagggaaggaggaaaataatttaattatatgttaagtaaaattaattttaaaattaaaaaagtgtgtgtgtgtgtgagagagagagagagagagagagcctaaatgactttatgtgtatatcatatgtgtgcccataggtgtacttgggcccatgtgcatgtatgtgcccattgagggtgtcatgtcccctggagctggaattacaggtggttgtgaataaccagcatatgctaggaactcctctgcaagagcagcaagtgatcttaaccactgagccatctcttcagccagtgggtattttatgtaatacattttctgggatttagacactcttcatccatggttagatgtgtggccttgtataattaaattccttaaggttttgagacaaagtcttcatctgaaatgtggagttggacaaagactttctaagtttcttgcattcccaatgtatgccatgggttctgtgtgtgtgtgtgtgtgtgtgtgtgtgtgtgtgtgtgtgtatgtgtgtgggggtgtgtgtgtggtgtgtgtgtgtgtaagggtggtgctaatggaaacacatatcatgatgatgtcaccttaaaagactaaattttctagcataacttggctagcataggtaaacagagcaaggggcaggaaacttgttctgtaaaggccaaatagtaaatatgtgtctttgtaagccacaaagtttcaaccacaactcttgaactctgttattataatgtgaaagcagctacagacaatatgtaagtgaaagtatgggccctgttctgatgacattgtacttaataataataataataaaaggtggccagtgggatatggtgcaccttctgtgtcatttgctgacccttaaaactgaagtccacaacctgagacagaagtgtcttgtcccaggtagcttcctgacaaaaccctgtgtagcctttgtccttgtgtcaaacatgggtcattcaaccacttcagctgcccataaccacctcaaaatgtaaaccccaaataaacgacttgaaggagcaggcttgccagtgaaagggaaccctaaagaaacagctcaggcaacttgtttctcaggcagaaagataaataaatggctttatcagcagacagtgctgaagatgaatagcctgagggaacagttgagcagttagttcattgagacagggaaagcaagaaggaaggagaaaagaaagattgattgaataacaaaccggtttgtgagctctactgtacagtcctgcccagctggtactttatcttgaatttgttttgcaaattgcagatgcctagctctggaagccaagaaaaagaaagggtagttattccagccagaataatcccagggatctctagtaactcacaggacttcgtgttcatagggggaaatcattatatatccttcttgtaaattagagacacagagagccattttaatcagatgtgtagaataacaaatattctttagctatttttttaaataacaggagaagaatacttattttctaacttttgagtcctctgtctgtgtttacagctcacaaaactgttttaacagtgactaattccgatgagccctcccattccaattgtctctcaaggaattggcgaattctttcgtttgctatctctgacatgtctaataccaccacttcctaccttgatgaagtcggtcctccctgacagtcagaatccttgtttcacactgaaacaaataattaaccacatcatttctgttttgaggcatcttttagaaaaatgactcatgtgttagctacaatttactgagattctttgttaaattaagatccatttgccaagttttgcctctactgtttgagcctaagattttcttcatacaaattgtctggttcaatatgtattctaacgtgaggcctcaaccatacacaaagaattacaggcaactgaggaaagttagtggttcaagaggtggtcttcccaatcagttgtccagtaccaaatggtcatcattgaaagtatacacacaagtaaaattacatagacccaacaggttatatttaggagcatatatgcatatataaatacatataagcatgcaataccaattgctgaaaaaaagggtcatgaatttggagtggggagggatatacaggagagcttagagggaggcaagggaaggggaaaatgttgtaattaaattataatcctaaaaaaattaaagtaggggctggagagatggctcagtggttaaaagcattggttgctcttccagaggacctaggttcaattcccaacacccacatggcagctcacaagtgcctataactccagttccaggggatctgacatcttcacaccaatgcacataaaatgaatttaaataaactatttttaaaaataaaagtagaaaagtatatgtattctagaattggggtatgaaaacctgtgactacatactaaatggaaatgaagacaggagaagttagcatcaaatactagggcattagaactaaaaacagaaaaaaaaataaatgaaagatagtgtgagttaattatgttaatcagttgtatgtttgttacttgttatcaaatcaatctttgattccaatttctctataatcttgggttttctatcatagaaaacaccacatcaatggaaatggtgtgagtcattcacagccacacagcacattcatatacagagtgtcatggaagctgaacatgtgccaactttcccgtgactttcatgtgtccttcagagggaaggctgtcttgggtgggggagaaccaggtgacttctatagtgttgagttctccgtggctgaagctgaggaagcagcaaccctggatgtggagtcagagccaatgcattggagcatatttttctttcaaaatattttatgtactgaagtttgcacaacatcttggcaatgaaggcatgtctgtgaaggaggtgtcttgtgtttcacagctaacataagggcagaaaatgtgacagcagctaaatgtgacttcagtcacaaactgaaaagattgtaagagtaccgtggtaaggtctaagagctacagagtcaaaggtgaaaaatctacccaattccaaaaggccttatcttcctctttcccccataccagggcacgtctctctcctccagcactagtttcaaatttggacaacacttgagactctaggggaaagggtcttagaatatttttggtattgtctaggaatgaaactaaatttagaaccgtccatctgtttgattagaaagaaaaagagctgcattttcttggcatgcacaccctttataaatctcagagatgggtgttgttccagatttctctggaaattattttgaagctcgccagttctgccaacaccaaacacgctgtccatctcttttcttttagttttttaaaaatcatattttatttattctttgaaagtttcatgcattaatgcaatgtagcttgatcctatctatccaccactgcttccttccaacttcccttaatgccccctagtccctctccctcccaacttcatgttctccttttttgtgttattaaccctctgagtccaattagtgctgcccattgttcatgggtgaggggccacgaactggagcatggacaacctaccagtgtacgttgtaaactcatatgcaagctgaggggacatctatatgtactcgcttccagtttcaactgaactctgtgtctctgataaagctgtcatagaacagttttcagtgacacgtgaggcctgacttacttcaaaggtaaaaagataaaattaaaaatgcactgttgaaatatcattagtatctatgagtggccatcgtggtaggacttcctgggagccagccatttgacagtgccctcttgttctcatggggagtgtgtgatgtcagtacctcagtgccattgtcattgtctctgttcccatcttacagataaggaaaactaagtcacttctgccagacctcatgcctaataaatgccagaaccagggtatggactggggcgagccactccctagagctcctgctttgtccactatacgagcattcaaagagatcaaaaaaagtctttagattttttttctacctttttgccaatcatttcctttaaacatgatttttttttcctcaaagcctcacacaaaatttcaggttatgtttttgaaaagattgttcaggttgaaatggagcagaggtccaatgactgcttccagcacattctctctcggcttgattccttccactgtcatttccaatggttcttacactcctcatccctgtctctttcctcccaccacacattctgcttctctctctgaggagccccaaggcttcagcccccaacctcccatgtatttcctcccctctttcctcccaagacactcaactcacagatcttcctctttgccgttctgccaggaactctcaagaacttgtcctcaagtccacatccctagtggcttgtaagacacacaggaggaaatgactaccaagggccatatggtcgtaaaacagaaagctgcaactgtcccatgcactacgttttggagtgtggctgtcttaatgattatgctagatccctgtgctattgaggcagctattaggatcaagtttcctattgcactgggtttcagacagatggctttctactcttttaaaagagcttagtggctaacattttaaaagagaagctaattcccaagaatggtgtgccacccctggtatgcacgcttcatgacagttcctattttgctctgttgtaagcacatacttgtccggctggggagtaagagttgggctgtctggcctctgtgtggttcctgtttcccaaaggtaccatgaacatgagctggcaattaagtgaagtaaagcacctccaaggtctctgtcatcagtggatgaggtttttatgttacacttctattacataatctaaatttttatttcataatattttgttgtgttttgcattttgttctttgagatttcatctcctgaatcccaggctggactcaaacccattatatattagaggatgaccttgaatccatggtcctcctgcctctaccaactgagatctggggttacaaaaatatgtcactatgcctagggtgattttataattgctaacctttgtatacatgagcatcttccagccattggttagataggagtatccaagcagatcatgttttctagtcttcttggagccctactggtacaaagctctgtacacctcactgggaaataatgatacttcacaggtttggttccttttcctgcagggtttctactctattaatgtctaaaacctggttgagtcctcacatcagaatggtaattcatcaatatctaatatcacttggtatatgatgtgattttcctcaccattgccagtgaatagggtgttgtccctttagcataaactgctgtgagagccgtgagtctgagtaaaggacacatgcctcctgtccagaatgactgttcaacttttaaagttttgaaaaggacatttttgttgtttttgttttgttttgttttgtttttgtacgatcagatataataaatgcacattgactttagaaatggctttcactctgtggtgcctttgcttctaagaagttgagtgtattactgtatattttcatggtaatcttctttgaggttccataaacacctcctggaatgaggagattcgatcctatgagtcagatgggagtttatccagtgtccaccattcgacctacctgctctgtttgctatgttatacaatgatttcttctatatttcaaaagcaatctccacatgtccaacccattaaccaaatttgatctccaacagaatgaagatgttggcatcgaggcttcacatctctgtgctccctgtgtcttatttaattcacagaagctcccccttctcctttctcttctacaggatcaacacactgtggtaggccagaacacaggccccagtccaagtcccaactcctgctcaaacccaaacactgcaagtggttacatgaactcccagcagtctctgttgaatcagcaaatgatggggaagaaacagcccctgcagaggccagccatggagccaaagcagcagcttctcctccagcagcaaatgctgtctgactcggtaaagttatctcctgatgtctatggtgtgtgcttcttgaccttggagaaagaaagtgtccctttgcccttctgtgacagcaatgagggaatagtggatgcaagagaaactaaatcccatgcatttaaaatgtaggggagaaaacaaacaaacagcaacaacaacaatgacaaaaaatcttaaaaaataaaaataaaaacctgatttaccagctgctaggcatatggaatacacagccctgcccagttcaggaatgtctgtggccacagggcacttgaatggagtaaatgaaatctcagttgttcccagcctcaaggggtggaaatagtgaactgccctttaatcatcctgactccaaactgatttttagaggtaaatgagttagttttaaagggaattttaaaggccagcatggagtctcaccaccaatatttagcttcctcccccccaaaaaaataatcatctcagaatgggggactgtttcaaaaattttatttttgtttcaaaaaatttatttattttaaataaatctccatgttcaccatattggcctgaccttctaagaaccacaaggttgttttccctcaacactacccaaatactagccttgcttgagtatttatctactcagtcctctgtatccgcagacaccatcatacacaactgcacttacttagacagctgctccctctgccttcaaactcctctgtccagtgaaatcaaaagggacaaggccaaacagttcagggctaatagacccaacgaaagggggaaacaagattaggagatgtggctcagaagtagagtgtttgcccagtatgcattaggtcctgttttgatctcccagcactgtaagataagaaaagttgactaaatcattttatacacaagaaactatagaaatagccagaagtgctgtgttataaacaccaggaatattcgctgaattttaaaagatcatgaagatacaagccacaaacaagatagtccctttccttcttgttgtcctaatggacccagaatccactgtgaacatcaaataaataggctattgtaatgcatatacttaaatgctatgctgtaggaatttctagaaatggcttcagagaaaagattacatctactaaagatcagaaagtacagaaggagtagggaggaaaaatggagggtcaccctggcctggagatccagaacactcgagactcaggtacacaaaggacacaaagtgtcaagtcacagagtgtggtaaggatagagaagtgaaggacacagaggccccaggaagaggcttgctaagtcgcactgccttaaatgcaattgattttaagaagagacactgagctcagatttacatccaataaagacagaggccagtaggagagaatgcccagctccagttaagaaatctgacaaatcatctccccaaatgagctaaaatttggctttaacatggtaagactacagtattctgatagacagggtagcgtccaccacgttaggcagagggcagaccaaagaccaacagaggcagccctggcttgggcttgtatttactggttagttttaggtaaaactagtaacaatgtacccatcacacatgtgtttaaaggaatgataagtttaagtgagtgcttatgctccagatgtctgaaatctgtggtcacaccttttccttcctcctcctcatctttttatctttataaccaaaattgcctagaaacaagggtgaagaggagagaatgtgccatttcaaacggacttcctggcaagacttttattattcccattgttctgcaaatttgattagttttacaagatggagtttccgggttttctgcttccattaaaagcccctgtcgaaaagtgacacacacattcttgggggcctggtgatggtgctggcctggctcccattgagcccctcttgcggctcacaggtgcaaagggtagtggtgggatgactaagaagggagctgcactttctgtggttgttacaaagcaacttcgagggtgcctgtgctctttagcatttccaggaagaagcagcctttgatccctctttacattagcatatgctttgtagtaattcaaggccttggcaaggccagatgggcacctaaatggaggtgtttttttcataaaagtttgttagtcttactctctaccattcttccaccagtgaaacacacaaaaaagtgggataagtagcagttactctactgatcatcattgctagcacgtagtagaaacctcctgtgtgccaggcaccatgctaaagttctgcagaacaaaaggattcttccttttgtatgaaagagatcctagaacctcccaaatcttactttttttacgtccaaggaaaccaaagcaagacagatagcactgaagcaagagagattggaccatgatgaaaattcatttcattttacacagaggtgatttcagtgatatagtgtcagtttacatgggtgtctttttgtagcttcctccattcagtgttggggtccagactttactgtatatatattattggaatgtaatatataatgtaatacatataattacattccaatcccagttccccctccctcctttccttccactccatccatccctccctcctcccatctgctccacaaagagggtaaggcctcccatagggacttcactgtcttgtagcattgagatcaaagagtattaagaaacttgggttttcagagatgtgaatgctaaggctttcagcaaatcaactgatctgttggagaaagaaaaaattcaactgcttaagatacattaagtaaagctctatttgaaatatagtgtgtgattgggagtaaaaggaactaattttctctctctctctctctctctctctctctgtctctctctctctctctctctctctctctctctctcacacacacacacacacaagtgcatactctgtcatcacacaaacagtagtaacacctaattatatatgaaaaatgcttcttggaaaagagatttcacaaagtcccattcttggcttaaaagtcaaaactgtcagtttacacaagtttttatagcagggttgcttgctcacaaccacattgggttggtgaagtccccaggctctttcttaaacagttagggtttgggcaaccccccccctccaaaagaaaagagtttcactgaccagtttttcccttaatttgtaaacccatgtttaaaagaagaaatgtaatacatatgcttctgattcatttacgcttagctcatcaaaattatgttttatatgaattacttggtgttcaaaaacactctatgagtctttcaagtttgtttcttcttagaaacaagaactaaatttggtttgttgttattttaaggccctttcctgccccttttagagaacacacatcccactaggaaatttcagagctgagcagaagctgagagtttgagtggtgcaaacacacacttggctccaactaatggcctcatctgtctgctacagttgtctatgtattgactttcctataattatagtcttctgtctctacctatgccaattactcttatctgtagaaatggatattgctttacagtgtatacagaattacattgaagccattccagaaagtttacaaagcacaccaagaaagaaagcaggaatccctatcccaagctggtaggaaaggcatagtcatgcatcttgttccctgtgtaacataaagtcttaatgtatgccaaccttagacagggttaatctggtgtcatgataaactaataccaaataggccactttgtaattttatctaaaaacaagcaaggtcaccatgtgctaaatgttaccatctccagctagtgggtaatagctactctttcatcagtctaggacagcactcgccttccctaggtcacccaggctgtctcacagccctcttgaaacagttgtggctcctcatggctccttgctactgtgagtaatgacagcagtggggatgttcctgaaggtcggccaaggtattggcaatagtaaatggatgtccctatttcttctcttaccacccaaactcatctagtaaaagaatataaaggtaactggctctggaaaattctgtgcttttcaagcaggacactgaggtctttgtcctgagtggcatgaaggaccccaagttcctgagtctggaattgatatatgttgtattactgcgtgactttgagcaagttacttagcctaatgaaatttgaatgtcctcttttaaatgagaataaccatggttaccttcaaagatttgttaagatcaggtagaagagatgtgctgtgcatttggtgcctgcaccagttcctggaagattagtaaatctcttggtatcctttccatggagaagcagaactgccaaatcaaattacagaaagcccaggtgttctccattttatctggcaaactattttccaaagtctttgatgccagagttacatatggacaccaaagctcaccagacatgctacaacataaaacaagaagtactatcaccaaacccacacacattagttatacttaaaatctaatcacaatatgaaggagatgagaaaaggcaggccctgaaatccatggaggagcagaaatgacatttccatataggaagttattccaatggaaaaatcagcctctgaatctacactaccaaataaattacacactggaacacagagtgtgaaataatccagttttcttgatgcaagttctcactgtagagcccatgtggcttcatacttgtgatattcctgcctctacttcctgtatttgtatctttttgaacatcataagtaaaaaggtgttcatccaacccaatgttttcatttgtgttttcaaggagaagacttcccctcaggatcagataaaccgacatctgacaaggccgcccccagactacaaagaccaaagaagaaattcaagcagcctgcagccagctactcagtattctggtaagagttcttcaaaactaatacaaatcacaactgtgaaaaaagagaaacaaatccatttctactgttttctctccccaccttgcatagtacatcatcccaaagctttcactaacttgacttaacagtcagatccaaacacattcagatctgcattatggctcacaatataatcccagcactcctgaggcaggaggagcactgcaagttcaagtccagcctgagatacacagtaaattccaggctagcccagattatagtgtgagatcctgtctttaacccttcatcctcaaaaagacacatgagtcctttcatgtgtccttgcttgtccatcatgctctatgctcaagtgttccctactcttctcacatgctccctactctcttcatgtgctccctactctcctcacgtgttccctactctgctcctcacgtgttcactactctcctcacgtgttcactactctcctcacatgttcactactctcctcacatgttccctattctcctcaggtgttcactactctcctcgctctgtgctcacatgttaattattctgccaattacttgtgagcacatgttccctattctcctcagatgttcactactctcctcaggtgtttactactctcctcacgtgttcactactctcctcacgtgctccctattctcctcagatgttcactactctcctcacgtgttcacaactctcctcacatgttccctattctcctcaggtgttcactactctcctcaggtgttcactactctcctcaggtgttcactactctccttgctctgtgctcacatgttaattattctgccaattacttgtgagaattttaaaaccctgaagattttctaacttctgtgttcactcaccctcctcatgttgaccttggcccaggcagtggaaggttacatagaaatagctctttttagaacatcacctggcagcttgcatacaacctcatcattcctcattctacctctgagtccatcttcccaagtattctccttgaaagacaaatcaccttgtcaaaaaggaaaaattaaaaagcaaatcatattttataaaacctttctaaacaaaaaggaacgatttatatttcttttctatgcaagacgcaaaacagagctttttactcactgtcattctcatgaaatagggcaggtccttgtagtaaaacctctcttcagaagttctctgaatcccaaagaatcttcctcaaatccagcccatgctgttcctgctccctcatttccagaaatttctccagtcacgtctgtccagaactctgattttcttatcacattaagctagtatcttcagtttctcaacttccttttctttacatgtttccatctgaccaagaagtcatcaagaatattctctaaaaagcaggatctatggacactcctattgctgtctcctgtcctgttgcaaaaatactttaataggttgtggtaattctttcaaatgcctgaaaatacaacaggttatctctccactgaaattaaaaatgggaatatgtattccgatgctttttttttttaagtgcagacaatttttttttaagtgcagaaactgagatctcatttcagtttggttgtcctcaaagacaggggagctctggtgaggagcacggcctcatgccataggcaaccaacaggctctagagaaccagcaagccttttcaatagtgtacaagttttcaggtaggtgtttaaggtttcctttcccattcttgtagaagaatctctgggatgggagtccagaacagattgctatctgcacagtgtcaccagagtctaggcttctttttgtttccttaacatgtggctcccatcccaagggctgccctgcagccccacatcaggagcttccatgtccaaattccaggcagggagaggaaagggggaaaggtaagaagcctcctggaggagccatgtcccctcataaagcagtcttctgggactcttgcccactcatctttacctctagccacaatgtgtttttgtggattttccatcagcaagaaaacccaagatttgcgctttgtcacatgaacacattgctgtaaacactgaggctctgattcagaggaagacagggacaggacaatgacacccacccaatagttccttccaaataaaatgtgggcatttcctgagaaaagtctttgcatactgctgccaccccaagtgggtaagagtcactgctctggggcatttgacttcatgtgcctcctgagaataaaacaaacaataacaaaacaaaacaaactctttcatgttgctttaatttttaatatcagtccagaaataattcttttgttggggagggggatcaagcccagggtcttccttgtgttgggcaagcattttcccagtgagcaacatctctagcattaaaacttcttatgtaccctacagagtagagcatcttgtataaagaggtacaagagactcctcccaccttggggagcatatggtctagttgagggtgtgttttgtagtaaagagaaaagctaaggagttggcttggccttgtcttttgagttacacatcataccagcagggggtctcctaagaagtcacttgtgggcatgctcttcacatacctcttattttgtgtgtgtgtgtgtgtgtgtgtgtgtgtgtgtgtgtgtgtgtttgtgtttgtgtgcctgtttcaatatcttcatgatttctctgggttttgtctttccttcaatctccttcattaaataattcaaaattcagttgaaccccaactctgtcagctgctagacctggaatacaactataaacaaaacaagggaaaatgccctggtggaatttgtcatctaaggtacccctttccctccatttttgcctctcaagctgatttctcagggtgacttcagccttcctgagccagggatatttcagtgcatctattagtcactgtctgttgtatggagccatcttattcagcagcctggggcccagttattgccccccccattcaatcaattgttgacaggcatcaagtttaactggcagcgcttctgatgtccgtggactacctcggtgctcagtggaagaatcaaacagaaaatggcctccaaagaaatgagattaggatattaggaaaagcttgaaaatagagcttcagagttgatctgaatcctgaagaaaatgtaagactcaaggggctaaggaatatcacaggagtaggagacagataagcaaagaaggctggtggggtattcaatagcagtgcagtagtgggtgtgcacccaccagcaggcttctcgtatggaaataatcaccagaacccagattacatcaaattcccgattcttaaagagatgagactttgtttgccctttggatgcagggaagccacccatagcagcttcttgaatgaggatgatgcagataaagaatgagagatgattttccagggcacaggttccgagtagtagtgtagtggccatgaataggatttatcccccactttctcatttggaccctggggtggagagtaacctggatttcatgacagctagctaatcaaagttgtagtctttgaacttggaacacaacaaaagtaattcaaaatgaaagattatcacctcaatgacttcaggagacaaataaaataaaaactagaaaataaaaccattctatttcagtcttctttctgtaatgtgcaaactcttaaccaagaaacagtggcctagggagatgttctctcccaggtgtcttctgttctttttgcctggtgtgtttcatatgttatttgtctaatgataagttcttgcaagctgagacaggagatgccatactatcatgaacaaatgtgattctcttctctgtcctaggtggctcctctaccgtgaatttaaactctaaccaagctttgacaaatccagtttcaacacccaccattttagctccaaactccagtctcatgtctacatctcatgggatgagaatgccactgttatccacagcagttcagaacatgggggtgtatggaaacctgccttgtaaccagcctggcacctacaacgtcacttcagcaatgaatcagctgacccaacagagaaatacaacccaactgataacaaatcagaacaaccctctgatgccacggccatctcccttaggggcaaataatggtaacaatgtggccacctttggagctggatctgttggcagttcacaacaactgagaccaaatctggctcacagtttggcaggcatgccagcccagaggtcatcaactgttatgatcacatccaacacgacagcaacaaactgggcttctcaagatgtaacggcgaaacaacaggaagccctcaaatccacaggtgtacgcttcccaacaggtactcctgcaacctataccccaaaccagtcattgcagccaggagtggggagccagccattttcccagagggcagtggcgccccctaaccagctaacgccaacggtgcaaatgagacctatgaaccaaatgaatcagacattaaatgggcaaacgatagctccactcaggggtttgaacctcagacctaaccagatgagctcacagagtctatctaatatgaatccatcaggaacaggattgaatcagcctcggacaggcaccaaccagccaccatccctgacgcccaacacttttccttcatccaaccaaagttccagggcttttcaaggaactgaccacggcagcgatttagcttttgacttcctcagccaacagactgacagcatgggccctgccctcaacagcgatgctgatttcatcgattctttattgaagacagagcctggcaatgacgattggatgaaagacatcaaccttgatgaaatcctgggaagcaattcctaaggagaataggaaggcgctttgcaggcttcaagcagtattttctaaggacacagtaatgctaaactgctgacatcggtgaactacagacatcaaaacggaaagctggcagtaaccacggtgacaaacattctggttcacgtgcttgttttaaaaatctcgagcctgatattaaaacattgggatcgcttttccctgcctgaacatcaggacgtgttatccagtttatccaaacacaactgtgatgttgatgtgtaattagttatgtataatggtcttcccaacttccttttctcggtgaaggaaatgtaatggaacttgagacttgtttcaatcccatatcatagtcaggcagagactggcatctgctctagtagataagtatgctttgatttctccactatctttctatttccttttcctaaaacttgcaggaaagactgaaatgttatatggttgtttggagtaagtaagagagaaccagagaacctagaagccattcagcagattatatgatttctttcctagacacactgctcctcagttttgtaattttcccatgtgttttgtattttggtaggatgctatgtcttgtgataaaacaggaatgcagggcttacaacttgaatagggcttccctaccaatttttatagataaccaagacgtgtcgtgatcgcactgaaatatcagtgcacaaccgactgcataaaatttcacttcaaaaaaaatttgaatcttgccatgtagaagacaaacatggccacaaataacccaaggtgtttccagctgtgattgatgctactagtttgttcccaagcagaatgcaattgagccttgtcctcctcttttttttttttttttttttttttttgtagccttgagacttgtttgtagaaaatgaaagtttgggttagagtgaaattagagagcatcctgttttgactggagataagaaacaggaggatagctgagagataatagggtcttcctgggacatagtgcttggacttggatggacagctgagcccagtgtggtctgtatgtagccaccacttactctattcgtgatacaagtaaaccattggcctgtggtgcctgagccttcttatccaggtttctcctcagggctgagtgtgtggcaaagcatggatttttgttgggtcactgcagctcagtgcccacatctatgtacactgcaaagtggaggagatgtataggttcgagttcgttctgaaatgccactaccactgtcctaaattcagagaatcaaaggctactctcaaccttcaagttatacattcacatacttcactgtcaggtgtgacatacccaagtcactgaaacatcaaatcttcacaaatctgttcggaaaaggaacaagtttttaaagctctgtaaagccctcttctggtctttacaacgcctttgggctctctccttcttttccaccacaccaatatcgctggcccagaatctttcctgcgctgatttgtaaatattaataaattacttgttttgtaaacttttgtaaagaatattttggtagaaatacttaaaacatattctttggattatatttatacatatgtgaaataaatatactatcgaaaggttatattttatacaaaaagtaaattgttaccttttgtatgctaatatacaaagttttgtataatatgatggtttatttttagctctacacttaaaccgtaggtgatggagtggaaacttttaaaaactaccaagaggcttgttagacgaatttgtattctgaacctccatatgaaagcattccaggtttccagccttccctgttgttggtgtgttttccagctctaaattctttattaagcccatagttcttgtgtcttatttgattattctgctgtgcatattgtatcagtccctgtaataggcgttctactgagtgttttcccattatacaaaacaatgtttttccatgcagaaagagaggaaacacaattgtgtgtataatcacattggttttgtggctccttcagattactgtacatagctgcaggatttctcagttgcagcacctgtaattcagtttgttttcaccctaacacaaatagtacattttgtaacagctgtccagctgttcaattgaagaggcaaagcaaacagaatggccagtttttcttctattttaatgtgaatttcataagtaatggctatttattcagctattcattaaaatacaggattctttggggaggatggtgtaatctatagtttctgtttgttggcagcctattaccaaagatgacgtaattttcctgaaagctgagataatgacaatttgatagacaaacatagtaagagcctcaggatttacaacgtaagagctattgggatacaagcacccatttatagaaaggccagactacttaatcgctgacattgcttatcattctgacatataacagagaaggtaggagtcatttcgctttctttatttaaattcagagacaagaaagtaatgtaggcaaataattccttcttggctttgtgttcagcccaatgaatgagtcaccaagtgaagtgctggtgttacctgcattgctgtcctgaatccacaaatgtaaagatttcaatttgtaatacaagtattttgtattgtatgcaattccatgtgtaaaaaaaatagttaaaaaattcagaagtggttttcttgtatgaagtcatactgtcagtcaccaatgatatcattacagcattacagttagaataaccaatgttaataggaatggctacatatacacaaattattcttttttaaagatttattttgtactttttaattatgtgtatgagtgtggatatgcatgtgtgagtgctagtgcctgccagggctagaggatgccctagagatggagtcatgagccaactgatgtaggacctgaacccaggtcctctgaaagagcagtgagtaccactctaaaggtgctgagccatctctccagcccccatggaattgtactgtgcatggagcttagtagtaaaatgcagagtcctctcttttcagtgttgttccatctacttagaaagatcatattttatatgcttgaaattttacatgcaggacttggaagatagataagtcaagttgactgtggcaaaaggatgaggacatttcagtcctcaacactcatgtaaaaagctgggtgtggtggtacatgccactgatactagctctgaggaggcagaggcagccaacctagcctaattggtgtgctccaggccaatgaggaatcctgtcttagaaaaagtgaatatcttaggtcatcatctggcttacataccacacatgtcaacatgtatacacacacacacacacacacacacacacacacacacacacatatgcaagtacacatacacactcatacactaaaattaaatgataaaattttaaatgcataatacccactaaatgctgagaatacactgattaatttttaggcactgtggtcacttgtctggcctgatatgtggcatttggtatgaacacatctcagtaaacacacttgactgtatatggtacacagctttctgcagaacctaggtggctaagaaaaactgaactaccctcagttctcttgccctgctaattatactggtaggggtccaagtatatgatacaagtatttttactagctctatcaatggaaccatagtgaaactggtattttatgtggccttgtcccaaagaatctggaagactgggtggaaaacaaaattgtcaccaataagaatgaataatagtcatctagtggtatatgactttaatcccagcactcggggggggggggggcagaggcaggtgtatttctgtgagttcgaggccagcctggtctacagagtgagttccaagacagccagggctacatagtgagaccctgcttcaaaaaatagcatcagcttacatgaggagaaagagaaatatacaccattcagaacttctcactgacctccagtcagccttagaagagcatctaaagagaaaatgggagtgggaatgggagggcagtaacagacagaagactcttcttgtgatgttgtccacagtggccactgtatatttatgtgactgcgtttcatcacccaagaaagttggcatggttgaaattgaaacaaaacatccctactctagaactctgtggcttgttatttcacaaaactaaaagagtccactgaaaagtctcaggagcatcctttttaagatgaagaaatcatttgtcattcaacttcatgcaacatggcaaccgtctcctttaaggttgaatcataggcaagaacgcatcacatggaggccagattgaggccccatacaaacaggaaggctgtgctgaaggcttctcccctgaacaaggatgtgttaaccttacccaaactatgtgggctgacaataagagaaagttgaactcacaaaggaagatcaaaaaactatgcacctcacaaatgtttactctttttggctgtcttttccattcacaccttcccagacaattccaatttttaaatctcactgataatcttggcagcactgcctccttcagaatgcacagggaggccttctaaatcttatctgtttgccacatccgcctcccagttcatcacatctgggtgaggaggcaaagtcttctgccaggctgagatgaacctgtgcccaaaagatgtctgaacacacagtgcaaccagcaggcatgagggtgtggtttgaatgagatgtccaccatattcttaggcactgaacacctggacctcagctgctggcactgtttgggggaggtttaggaggtgtggccttgctggaagaagtgcatcactgaggacaggcgttgaggttaaagggtctccacttccagttttctgtctctgcttcaagctcatggttgaggatgtgagctttcagtatactgctaccgtgtctgctgcttgctgccatgcttccccgctgtgtccactggaatcatacactgaaataaactttcttcaatgaggtgccttggtcatggtgtcttatcacagcaacatagaagtagctaatacagatgagaggttaacatgcattggccacatctccctgagccttcaaatcaacagccaggaaagggaaatattgaccccccatctccctgccaccatatgtctaggatgcatggcagctacatttttccagtgggaattactgtctccttatgttactgtcaccacactggattctgtatttggggtggccagggagccagtgttctctgcagtctcactcatcttctggcagaattcccatttctctgacttagtgcactaaccttcagcttgagactcagtcagcacccaactttttttttttttttgaagttctattacgggaaacaaaatcccttcaatgtttcaaaggggcagagagattttaatataagaagttgggtactcaggtgaccggcaagttggaaagccacagtagggagggctacccagacatagcacaaggaagaagccatcacaatccccaaggcagaagggcacaaagattggaatggagttcagttggtagagtacttgcctagctgcatggagccccgagtttgctcaccagaactggaaggcagaggtagggagatccagagtttaacatcatcctcagctgcaaagccagtgctagttcaggaagaatccaagatccctagagaagatgctacatcatcagctggcctgccaggagaagctgggcccaaggaggaggtctccactactaatagacatgtcactgatgacagatgaggagaagaagcaatgtcacctccattctatccaggaatgagcctgcctggatgcagggctgggttcagcatgaggagcctgcagactctggttgtcaagtaatattacagacctatagcaaaacctagatttttcagcaaaacatactgagtaaactcctcctgtgcttttgaatatatcagttcatctcaatctgtttattataaaatgataccacctaggaaaagccagttgtgagtacatgaccctacacatacatataatggttccaagaagtgcatttgccatttcactgactccaagaagacatgtttcccatgtgtattctacagagccagtcatcatgtctagcccatgtgagagaaagcaccatgttattgtatcatgtcagctctttttcattcttagcgggaggtagtctagtagaacaatgatgaatttacagtaagcagcatctttgatttagtgacatgcatattggtttgatgcattcttggggatgatcctgactcactgtagtgttcacgcaatgctgtcagagagcaggtattatctgccatgaggatgtttcaggagcattttcctccttcttgtcaccttatggtgacaacatggttgttccacttctggtctacattccaatccagaaaagagaggaaaaggaaaaactatgaacagcaaaacaaatttgttgtctctgccttttcatttggaaaagacagccaacccagagacctcttcagcaacagctgttttgtggccttttgggtctttgggacaggctgcatggcaagtatttagtcatttcctctctagtatagggtgacaaggggctggtggttgtaaatgaaagtataaagacacaatggggatgagaagcataagctcagtacttactgtctgtgagagaatacagagcagagcaatgaagacagcacatgcagagccctgcagcagaacccggttctgccttcccactggatgaagactgctctgctggtgtacttatgcctttgtgtattatgaggaatgagaacaaagctgagccaaatgcttctaaacccttgctatagcagtctgctgtgaataaagagttattaacttaaacatgcaacaacacgaagatgatagatcacaaaagcagtttctaatagaaataattaaaatgctagatttaaaaataaaacttactgaaaatctatagatgcaaagatagtattgtactgcatataaacccatggtcagaaataaaacccaggttatggccaactgacctctgatagagcactaaggcaattcaacagaaccaaaacagtctggaaaatagtttctggatgtttcttaggaaagagaaaatgtcctaagatggcaaaggttgcaaaactctgaaaaatactcaaaatcactgaattatattttttaagatggagtctttcactgggactaggtctcctattagactggctgacccatgagccccagggatcctcctgtctctgcctccccaataccatagttagagatgtccatactgagtttggctttttaagtgggtgcatgggtggaacttggattcttgagtactttacccactgaactatctcataaattttatgatctatgattcatagctcaatgaagttgttctaaaaaagaaaaatgtttctgttaatacagacactgaaataaaaaacatggcatgcccaggggtgaggtgaatcctggagtgtgtgacaagccagtgtgggtgatggttcttactgactgttgggttgggaagccttgaacttgtactatggcaaccgcacaggtgacaatgtgtaggatatacccaggagggcttgctccagacagtaagtataatactaagacccccatggaaacctgacaccattacattaaaaacagaatagggctgctgttccgcaggaccccatcccagaacagtgaaaatgaaataagtccttggcatcacacaggggaaacccctcccttgaagccatgtgataacaagacattattcatgagtctgagactgtgttctttcagtgggctgtcctgcagctggggagagggaagcagggagagaagagggagggaaggaagggagggagtgagagagggagggagggagagaaaaaggcatgaagctgggagggagggtagaagtggctctgggaggagttgggggaggactgaatgatgaatatgatcaaaatacattgtatatatacatacaatctcaaagaagaaaatatatattaaaaaaatgtatgtgtccaaaagaagaatcctgaatgaattttgtatgtaatatatatgaaaattcatgaatgaatattgtatgtgaagcgtcccctgaagtagaaaggagtactaatattcctcacaggctcagaaattcctacaaagcttcaaagataaccattatcaagtcccttatcaaaaatcctcaagcacagggtgcataccagaaagccctccgggtccctcatggtgaaaactggagctgggaaacacacacccctgccgccataccaatgcccagtggcacacctgctgtcctcgacagaccacccagactcctgcagttgaaactcacatgctggcttgtggttgcttccaccacacttccttcaacctccggctccagagcagcaagcatatcgccacctgctggggagaagagctcaaaagtcagcacaagactctcctagagttcagagcctatcctgaaggccctttatagagatggggctcacagacagaggacctagactggtggccacattaggtagggagatctgtaccctcctctggagactgcagccttcggcatcgtctcaggtacttccagctcagcgtcagcctttgtggcccaaggactgtctccaacatttatcttccaacttaaagaggctcctccctcggccagcaatacaaccaagctatctggtggttactgtgtagcaaccagccacaagctctcagggtgggttaactacggccctcaataaacaaaactgtatcatgacctgagcccagcaagggcagcacagtggtaggcctggccgcaggatcccggtgttgtgaatggcctgttgctgagaggaactcatggcccaagatagggacaactgatcctagcaggaaaaaggatcagcaggagctgctgcggctcagtaggagagtgttggcctagcatatgctggctgatttcaatccccagtgtgaagaaggaaaatgatgagaagggtcacaaagaaaggaaaacacgttgaagagacatgattctattcgcaatagccaagaatttgaaggaggaggaagagtaagagaatgagaatagaaggatgaaggggaaggaggaagggagagaaaaattaaaaagaatccatgtacagacctcctgttctcatgggctaaaataagcaattttgtttaaaaaaaacaaaaaaaaaacaaacaaacaaacaaaaaaaacatactgcccaaagtgacttacagatttaatgtagctcccatcagaatggaaagtttatatggaatcatgaaaaactcccaaaatgccaagcaatttgaggcaaaaagaacaaagcaaggatcattatactgtttaactttaaaacattctgcaaatatctataatcaaaatggcatggtactgacataaaaacagagacaggctggtggaacaaacaagagttcccagaatcccagaagcaatcccacacatctacaaccagtcaaccagacaactttttcagtgatacatttgtagaaacatgggtgagataaagaatatatatgttttttgagatagagttcctctgtgggtagtcctgggtgtcctgaaacccactctgtagaccaggttggcctcaaactcacagagaattccccttgcctctgcctcctgagtgctggaattaaaggcacatgccaccactacccagcaaacattctttttaataaacactgttgagtaaattgcatgtccactgcagagtattcaaactagagacatagttctcaccaattaaaaagaaatcagttaatgtgggtcaaagaattgaagctatgtgatatatagaagaaaatataggagaaatgtttcatgacatggtgatggacacatacatttggggacaatgttcctaaagcatagacatggatgactgtgttgaacaagagagcctccaggcagcaaaggagatagtccacagagggtgacagcctgtagaacgggaggaaagatggcacactatatacccaacaacaaattgatatccagactatataaagaaccacaaaagctcaatatcaagaaataaagtaaaaacccaaatttaaaataggaaaggattttaagtggataatttaaagtgggtaacagctccagccgagcatgggtgagagcaggctccctgggtactgtgggcaagtgggctccagctgaccgtgggtgagcgagctccagctgactgtggtgatgtgggtaaacaggctccagctgccatacacagggacaggtcccctgctacgccttctctgcagcgaaggactaaacatcttttttgtttgtttgttttgtttttttgagacagtgtttctctgtggctttggaggctgtcctggaactagctcttggagaccaggctggtcttgaactcacagagatccgcctgcctctgcctcccgagttctgggactaaaggcgtgcaccaccaccgcctgcagactacacctcttgaaccacagccaacggtaaccttttctcctttgagttgcttcttgtcaggcatttgtcatagcaacttacacagtgtgctcagccatgtcatattattccttagattgtacatatacgctgtgtatgtttgacatacttcacaatgaacttacacagggtgctcggccatgtcatacattccttggattgtacatatacactgtgtatgtttgacatatttcaaaataaatcttttataaatactatcagatactattagatatgtggaaattggggcaagagattgcaataaattaatatcataatcactaaagatttttcactcagatggctttaaagtgtcttcattaattttaataaaaaccagtgtttgcacgggggagggcctgagccctatcccaaaggatatgacagactctgatggcccctatggaaggcctcaccctccctcgggagcagaaaggatatgagataggtagggttttagttggggggaggggtggtaggggtagaggggagggagagggaactgggattgacatgtaaaacaatctgtttctaattcaaatttaaaaagagaaatataaaaaaaagtgtttgaagtaatagaaaatatgttacatagtagttcacccaagaaagaatcagagagtaaagccatagctgaaagctcccagcctcaggagtcacaacaactgtgaataatgacacttaatgagctctgaacaaaaaagagagttttaaatccaaacattttgggtcatatgaatttatttttatacaatgcatgtatacacataagtaattttattctccctccattttatttttatttattagattaactagctattacttctgttcatatcacataagagataggagaggatgtgttttatcaaatattaagctgactaaagtttgcatatagctttgaaatatctgcaaacagaaaatgacatttgcacatagtcccaggaataaaaggttggaatggtgtggaggctacatgtttataaaagtagattttctctattaagtattaagaaaggttatatggaacatgaatgaatgtaacattaaattatcttcaaggctgtgtttgcttattacttgtcctatagtaactttaaagcaatgtgttgcctccaagcattttagcatcagaaagtagagcagagagtgaggagtaccactttgtatgtgatgtgtgtctgtaacctcttgtataattctgacttttgtcatttcttgggaccatagaagattactctccacgtggtctttcggttgaagttatcagggcattttccttgatctttgagatggtcagtggctagaagaatgtttgtaattctgctaggagagtggcaaaactgatatatttgttcatcttatgaaaccaaatgccagtggtgtttgtgaggattagattttgaaaattcaagttagataaccactttattatggaaaaatattccatatcttatttctaatccagaaactatatgaagagagtagcactgtagctacatcacaatgcagtttcaagtactggaaatgagagggtgggcagaagacactcagctgtgcaagggcagggtgagtgagtttgaatgatacatggctatggtgatgagagttaagactgtccccaaaaactcatttcaaagcctgtcccttcagcatttcaaaggtagtggatgatatctggaaagggaattttatttcctgtaaatctaataataacagggtgttaaggctaaataacaggcatataaaataatgtgcatcagtgtgttctccacactaactgtgcacagatgtcccaggacgaggtcttctctcctgtcagcatagttttcatttctaaggacatcattcacactgccattaagtcatttgcctctcattagtgaacacagataaaattatctcccaaagggtttaggtccctaaggttggctgacaccagaagtgagttatgaaacaaatacatgtgtatttattttcttctatttcaaatgctcagaacatcttaaggtgtatttcacctcagaaaagcatgctcaaacaatgttaagtttgtaagttaaaatttgtagtatatatctatcgctcagtgttgctcttgctgatagtaagttttaatttgtgtatgtttacctttccttttcctggagtatacttgacatttgttatcattgtatatagttttgcattagacttaaagccttcttctctaaaagggaaattgcagtggtcttgccttgaacctgtaatggtagccacacaccccttgggcatggcctcaggccatggaagtggaaagagggaagcttcaggtgtggctttcttttgctaggtcctctggcataggtcagccgatcaggtaggaaggtcagagaaacactcctgccgttctttgtatttttctgtgtaagcgtttcccaataaacacccatttatcttgggtctagtgaattcattacaccaacgccttcaaaaatgcatggtactttgttcagaaagtccaattctttaaagattcatttagttctaatgatgtttcttttctggaggttccttgatgaattcctcccagcagccacttagtgaagacatctgaacttcgccttggttaagacttcaagtcccaccatttgatgtcatttcagtgatgtgagggactgtgtttggggatttttctaacagaggaaacttatcttaaaatttaaattttctagttgatgtctgtggtacagttaggtaaacattgttttgtgggaactacaacacacacacacacacacacacacacacacacacacacacacacacacactgatgaacatgattctgccttccctttggttgttttttgttttgtttttttcttttggtttttcgagacagagcttctctatgtagctttgtaggccaggctggccttgaactcacagagatccacctgcctttgcctattaaaggtgtgcgccatcactgcctggcaaaaatcaggttttttaaaaaactaaaatgctgaacattaatgtatttgcaatgaaacattttatacctaaaaactaaaattgtactgatttgccttcaagatgaaagacccccgaagaggtactttcatagaaggagacccgtacccaggaatcagcgagaccacgaacttggatgcaaaaagcaagaggctttattggatacacgggtacccagggcgacttagcttctgtgaggccaagtgcgctgagcaaaggagaggggtccttatatagcaaaaagcacagtacagaagcgaaaagcatagtgcgggcgggcatgtcaccgagtgtgcgagagcgagagagggagctaatggacaggggtctttcaaagactacccacagactttccaaagcttgctttagttttcctgctgtgcttcagcgcagtagagcactccgcacaacactgggaacttctcaggtagtcaagtttttcatgagagggccaggatggggcaagtacttcactttctattttgggaggaagggctcaggcatgccttgaaaactgacatttaaaaagttgcatttgagacttagggcataagagagagggagggaggctggtgtctgttgaaagctgaaagaatctttgagagaaactgagggagggatgtaagagagaagttttctggacttctactttagtttgagatgtctcattagctttttaactgtgagtatggatttctttcctccttacaaaagagatcagttgcccagctctgctcccatgctcctcccacttttactcccacgtatgtatttgtatgtatgggtgtgttatgcaccacagcgtgcctggtgccctagggggtcaggagagcgtgtccggccccctgcaacttgacaaaggttgtgggaagttttagaggtatctacttgcatgtccctctgttacagcacctacactgtccaccaaggatacaacatgggcactattttacctatcaagtactattttattttttaagaatttatttatttatttatctatttacttgtgtgtgtgtgtgtgtgtgtgtgtgtgtgtgtgtgtgtgtgttttgcctatatatatgtatgtgcaccacatgtgtgcctggtgaccacagaggccaaagagggcatacataatatttcctaggactggagttaatgacaattatgatctgccatatgggtactggaatcgaacccaggtcccatggaaaagcatctagtgctcttaaccactgagccatttctccagcccctttctattatttttaactcatatcttctgtttccctagttgtaattatttttcctacattaatatttgttttttcattttatttcctaaaccccattttatcatgtagtctttttggtctcttgtatttttcttttatattgcttaagaagaatcttaacaatcatttagcttgcatgatctttttattcacaaatatatcatcaactatttgcttcttctgctcttgaagcttgataggtgcttgacagcagtatgagcagaaacagagggcagtcctcatcctaagtagccaaagctgcttagatttttctttctcatttctctagttcactcttccatcttcccttagaagattttagtcttcattgtatctaaagttgaaattgtttgagcttacagatatctatgggaaatctatttgagcagtataaaaggtgtttcatgttaagtagacacataactaagtagcactcatctctagtattcttagaacaactaatgcgacattctgtgtgacagctgctattggaagcatgtggcatgttccatgtcatttactctccagagactttatgagacaaatatcccaccttttgtgcagaagcacatactgagacattttttgagacattttttggtgccgtacgtgcagtgaactcaagcttaatttcaatagccaactactatgtgatcttaaaaattcagtttaagttacaaagctacaacacattatgaactagacttttaaaatccttgtgtctacagagccaatcctgttggtggaactgtggtgagccagccctcaagttgtgagcatggttgaactgtccccattacttatctgtcatgtggcaacatgggagtgggagagatgccctccccaaccccatataccatcccacctcttaaccccccaccctcagcccatcaatccctgaggcaggtgagagagctgacacctgaggtcataggagtgggagagctctccttgcccctcatcagctgcagcactcaggagagtggcccctacaacacacctgagcaacacagtagagctggccctgaaagtgtaggtgtgggagagccgaccctgaggacatgaaagcaggagaactggccctaccccttatgcagtgttacaaggggtgaactagccaaggcaatgctagagagctgactgtggtggtgaaaggggagagctggtaggctgaccaaccttgcaactacccagggttattggttggcccactccaatatccaccccatttgtgatctgctggagcacaggaagggaccggacctacatacccaaagcccccatataaatatatagagatatattattaattatgaatgtttgacctttagcttatgtttgtcccactagctcttataactttaacctgttttcattcatctatgctttacctcaggacttcttacctttctttcattctgtatgtcctgctttcttgcttcctccatgtctgtctgtctgtctgttccttggcatctctttttctttcttttttcaagactaaattcctccctcattattggccattcagctttttattagacaaataaggtgccttaggcaggcaaggtaaaacagtaatacatctttacataattaaacaaatgcaatacatctttaaatagtcaaacagatattctgcagcataagcaaatgcaacacatctttacatagttaagcaaatgtaacacatctttgcatagttaaacaaatagtctacatttcccccttttgtttaaaaggaaggttttagctttaacatagtaagactatatacaataagaacaattatcaagtaagaattacatttacaatatccagtgcatttacatttagtaaattcagagaaaatactccattgtctatcctatcttggtgagtccaaagttgcatacctaatttactttagattctaatttgtattacctacaccaaattatctttttagacctcaaaacaatttctataagcatttatgtttctcaaccttataaactttacaactcttacataagtttcttttctaaatttggtaacaaggagaactatatataactcatcttcaactccatcagagacctgagaaggatgtaatattacctgagtaaacaggaagtacagagcaagcaacttccaaaactatagaaatgacagagacacctggattcctgggtggtcacccaaggttcctctgcaacactgggatatccattttcacccaactggcctagtgtgttctgtgaagcaggaattttgaaggactgctcccaccttgtcttggcaaagctcagcagcctttttcttttgtgtcctgcttgtcaagtttgtacagcatattctcagcagtcaaggcaagggcagtttcttgtccaaatggctagctttgacacaattaaagcaaactccatatggaggttcttcaatgcctatcatctttttatgaagtaaactggtgctaccaggagcagatgtgactcactgtcgtgaaaagccttaggttattaaacattttaaatgccatattctaaagcattgaagcaacttaagatcacctattgatctaaaatgtatctgtttaaccttgaaaacatacctagcatgaatgcatgtttggttgttatagatgactaactattaatcttcatttcttaattatcctaaacagtttgtaataatagctttcaaggactagaactttatattacatttttaaatgagctgcataggtacaataccttaagcaagagtagaaacatatatacatggtataaccaaagtaacattaaatttgcatcaatatatgaaaatccatactaatgtaaaatatttaagatgaatagttggctttttatcctatattcctatatctccactagtgatggtaaacatccataacccaccaaatgaccaaaaaccacccacagcacctcttgggaatgtgggtgttgtgttctctagactcttcctgttgtctaggggtgatggcatccccaggggatcctgagaaaattgaaatgctggtgacaacttgggaaaacaagctgtaacatttcttgtccagtctttgtgtaatgggaaagttcaaggcttatatgaagtcctggctagaatagtgtgtgagctggaccatgtcagttagtagccttgaagctattctggatgtagaactctgaggaaactgcaacaaaagcattctgagaggctggaccacctgggccacccattttcattggtgtctggtcccctttctctgaaaacacacaaactttcaaaggttaacatacatatctgcattaacacaagtatggactgtgtgttgtacacagcccaggaaaagataatttttaagcatgtaaaaacagactatagctctatagtagaacttgaagtcagagatgatgatgtcctcagatgatcctttgttgtacagggttgttttggttatcctgggttttatttcatatgaagttgaatattgttctttcaaggtctgtgaagaattgtgctgggatattgatgagcatagcatttaatttgtatattacttttggtaggattgtcatttttactatgttgatcctacttatccaagataataggagatctttccattttctagtatcttctttaatttctttctttaaaaaattaaagttattgtcatacaggtctttcacttgtttggttagagttaccccaagatattttaagttatttgtggctattgtaaagggtaatgtttctctgatttctttctcagcccatttatcatctgtatataggagggctactattttttttttagttaatcatgtatcctgctatattactgaaggtgcttatcagttgtaggagttctctgataggatttttggggtcacttatataaactatcatatcataggcaaatactgagagcttgacttcttcttttccaatttgtatccccttgaactccttttgttgtcttattgctttagctagaacttcaagtactatgttgaagtgatacagagagagtggacaaccttgtcttgttcctgatttcagtgggattgctttgagtttctccccatttagtttgactttggctgttgggttactgtatattgcctttattatgtttagatatgttccttgtatccccattctttccaagacctttatcatgaaggggtgttgaattttgtccaaggctttttcagtatctaatgatatacttatatttttttctttcagtttgtttatatggtagattacattgatagattttcatatgttgaaccatccatgcatctctgggataaatcctccttggtcatggtggatgatttttctgatgtgttcttggattccatttgccagtattttattgagtatttttccatctatgcccatgagggaaattagtctgtaattctatttcttagttgtgtctttgtgtggtttgggtatcagggtaactgaagcctcataaaaagagtttggcaatgttccttctgtttctattatgtgaaataatttgaggagtattggtattagttcttctttgaacatctggtataattctgtgcttaaaccatctgggcctgggtttgtttgtttttatttatttatttttggttgggagactattgataactgtttctatttttctatttccttggagtttataggtatatttaagttatttttctattctttatttaattttggtatgtggtacttatctagaaattagtccatctccttaaagttttccaattttgtggagtacaggtttttgaagtatgacctgttgattctctggattttctcagtgtctgttgttatgtccccttttcatttctgatttctctctctgtcttttggttagtttggataaacgtttgtctattttgttgaatttctcaaagaaccaactctttgtcttactgattctttgtattgttttgtttctattttatttatctcagccctcaatttgattatttcttgccacctactccttctgggtgagttttcttctttttgctctagtgctttcagttgtgctgttaattcactagtgtgagatttttttccccagcttctttatgtaggcatttagtgctatgaactttcctctcaggactgctttcattctgtcccataagtttgggtatgttgtgtggccattttcattattttttaggaagccttttatttcttccttgacctactggtggttcactgttcaatttccatgtgtttgtgggctttctgaaataaatgttgatgttgaattttaactttaagctgtggtcatccacaggatacaagtggttattccatttttttctgttgaggtttgatttgttatcaagtatgtggcctatttttgagaaggtttcatgaggtactgaaaagaaagtatattcttttgtgtttgggtgggatgttctatagatgtctgttaagtccatttgagtcataacatctgttagttcccttatctctctgttaagcttatgtctggcagacctgtccagtggtaagaatggagtgttgaagtctcccactattagtgtgtggggcttgatttgtgacttacaatttagtaatgtttcttttacaaaggcagaagctcttgtgtttggggcatagatgttcagaactgagatttcctcttgatggatttttcctgtgatgaatatgaaatgcccttctttacctttttttttgatttattttagtttgaagtctattttgttagctatcaggatacctacaccagcttgtttcttaggtccatttgactggaaaattttttccccaccctttactctgaggtaacatctgtctgtgagtttgaggtgtgtttcttacatgcagaagaaggatgggttctgtttttgtatccaatctattagcctgtgtctttttataggtgaattaagaccatttatattaatggatattaatgaccagtaattgctagttcctgttatttttgtttttgttggtggtgatggcattgtgtgttcaatcccattctttggtatttactgctgtaagatcatctatttcctgtgttctgatggacataggtgatatccttgggttggtgtttttcttctagtgctgtctgtagggctaggtttgtggataggtattgtttaaatttggttttatcatggaatatcttgttttctcaatctatagttattgaaaattttgctgggtaaagtagtctgggctggaatctgtggtcccttagagtctgcataatgtctgttcaggaccttctgaccttcattgtttctattgagaagtgaggtgtaattctgataggtctgtctttatatgttacctagcctttctcctttgcagctcttaatattctttctctctttctttctttctttctttctttctttctttctttctttctttcttccatccttccttccttcctttctttctttctttctttcttttttttttttttggtttttcaagacagggtttctctgtgtagctttggagcctatcctggcactcactctggagaccaggctggccttgaactcaccacctgtctctgtgtcccgagtgctgggattaaaggtgtgcaccaccaacgcctggcatattctgatgtttattgttttgattattatgtgacaaggggattttttggtctagtctatttttaagttggaaaagttttcttctatgattttgctgaatatatcttctgtgtctttgacttcttcttcttcttcttcttctatccctattatgattaggttcagtcttttcatggtgtcacagatttcctgcatttttgttgttgttgttgttgttgttaaggatttgttggatttagcattttcttttactgatgaatctaattcctctattgtatcttcaatgactgaaattctctcttccatctcttttattctgttgtttatacttgcatttgtggttccttatcatttacccagattttctatttccagaattccctcagtttgtgctttctttttctttttttaaatttaaattagaaacaacattgttttacatgtcaatccccgttcctctcctcccctgccctacctatccaataccatttctgctccccattgagagtgaggccttccatggggaggtcttcagagtatgtcatatcctttgggatagggcctaggccctcccctgtgtgtataggctgagggagaatccctctatgtcaaatgggatcccaaagtccattcctacgctagggataagtactgatctactacaagaggccccatatatctccgaggcctcctcactgacacccacatttatggagtctggatcagttccatgctggtttcccagtgatcagtctgggagccaagagttccctcttgctcagatcagctgtttctgtgggtttcaccagcctggtatggacccctttgcttatcagtcctctttctctgcaactggattccagttcagctcagtgtttagctgtgggtgtctgcttctacttccatcagctgctggatgaaggctctaggatggcatataagttagtcatcaatttcattaagtttgtgttttctttattgcctctatatcagatgtcaagtcttgaattgtttccttctcttgtttgattgcttttttcttggtttcctttaagggatttgttgatagtgttccaaatttttgtttttcttttcctccatttctttaagggaatatttcatttcctctttaagggcctcaatcatcctcattaagttatttgtaggtcattttcttctgcttcatctgtattgggatgttcaggtcttgctgttacagtgccactactttctagtggtgctgtattgctctttatattgttgagtatgttcttacctttttgtctacacatctcttcctctaatcagtataggtcgagcttgtgcttcagggggtctctctttctccaattgatatagttgggggctgtgactccattgactgttccttgagatgcaagccaagcagagcctcttgcaaatactcctcctggtggaagtgggcccaaggctcaagtggtcacttctttggtggaggtggggggttacagctccagtggacactcctcccattggcagcagagccatggctcctgtgattgctcctataagtgtaggtggggctgagggtccaatggtcaatgtagtagccaggtatctccaactgaggaatgtcagtgaatgctggctgggacacagctgttctttcccagagaaacttcttgtgagagtttctgcaagcaactgctggaaaccactgctgtatctttcctggtggtcattccctgctcctggcctgaggctcttgggtccctctgctgctgcttgcaggctggtgttcaggcctcccatgatgctgctccagtggtctctattaagtttgaaggaatctacagcctttcatttcctgtgaaagcaaaagcatgacctctcccccaaggcaatacatttttctgaattcaatttttttagcattatcaatcttttattcttgaccttttttaaagtaagacttggcaattagcactgatttagaaaagatttaagattcaaatgaagtggtcttcaatccttattctaccttatacaatgtcaagcatgttggttataatcacaacaaattgcaagcatttaactaagcacaaatgaaataattctccatagcatccaagctcaaatacccagttaatccttcataattatatctttgagcatcaaatttttatttcttttttattaactttttcattttttacatacccaccacagtttcccctcccttctctcctctccctgtctcccatctaccccctcctcatccactcctcctctgttgtctccatttagaaagaggtgggattcccgtgggcttgaagaaagcatggcccatcaaattatggcaggggcagtattgtagaggatgtggagtaaggggagaactcctcaactgctggtgggagtgcaaacttgtacagtcactttggaaataagtatgacagtttctctgaaaattcgaaatcaatttatctcaagatccagctataccactcttgggcatagacccaaagaatgctcaatcacaccacaaggacatttgcttaactatgttcatagcagcattattcataatagccagattctgaaaataacctagatgctcctcaaaccaaataatggataaagaaaatgtggtacatctacacaatagaatattacttagctataaaaaaacaataacctcatgaaatttacaggaaaatggatggagttagaaaaaactaattctgagtgaggtaacccaaacccagaaagacatacagggtatgtactcactcgtaagtagatattaggagtaaagtataggataaccaacttataatccatagtgccagaaaggctagataacaaggattcaaagagggattcatggatttccctaagaaggggaaatagaagagatctcctgggtaaactgggaggaggggtagggggattggaggataagaacatgagggatcatggggttgcacaggctgggcatgggaggcattggaggccaaacagaggggagattaacgaaagagatatcttcatgatggggccaattcagggctagagagaaacctggtgccagggaaacttccaggaatctacaaggatgacctcagctaagactcctaacaatagtggagagggtgcccgaaatggtcatctactgtaaacagattggtgactaactgtcatcagagagaacttaatccagtactgacggaagtagatgcagatatccacagccaagcactgggccaagctctgggagtccagtccaagaaagggtggagggattgtaggaacagaggggccaaggtgatgttgggaaaacccataaagacagctgatctgagcttatggactctggacttaggaagcctgcatggcactggcctaggccctctgcatgtatgtgacagttgtgtagcttggtctaactgtgaggcttctagcagtgagatcactacctgtccctggcttttgggaacctgttccccgtgctggattaactctcccagccttgaattcaattttaaagttaagatatccctaaagtttattctgtatatttggtgttttgattattatgtgtcggggcggggggaaggacttctttttgtagtccggtctgtttagtgtcctgtaagcttcttgtactttcataggcatatccttccataggttggggaagttttcttctatgattttgttgaatatgttttctgtacctttgagtagtgtttcttcaccttcttctacacctattattttggtctttttatggtgtcccatatttcctggatattttgtgttagggatttgttggacttgaggttttcttcggttgatgaatgtatatcctctagtgagtcttcaatagggggggttacagctccagtggacactcctcccattggcagcagagccatggctcctgtgattgctcctataagtgtaggtggggctgagggtccaagagcattgcctcattctgtgttttctttattgtatctatttcagctttcatgaactgtttcaagaacttccttcacttgcttggatgttttttcttgggtttctttagattctttaagagatttgtttatttcttgaattttttggtttgtcttttcctccatttcgtgtaatttttttgtttgctttttcttctatttctttaagggattttcttgtttcctctttaaaggtctctatcatcttgctgagataatttttnnnnnnnnnnnnnnnnnnnnnnnnnnnnnnnnnnnnnnnnnnnnnnnnnnnnnnnnnnnnnnnnnnnnnnnnnnnnnnnnnnnnnnnnnnnnnnnnnnnnnnnnnnnnnnnnnnnnnnnnnnnnnnnnnnnnnnnnnnnnnnnnnnnnnnnnnnnnnnnnnnnnnnnnnnnnnnnnnnnnnnnnnnnnnnnnnnnnnnnnnnnnnnnnnnnnnnnnnnnnnnnnnnnnnnnnnnnnnnnnnnnnnnnnnnnnnnnnnnnnnnnnnnnnnnnnnnnnnnnnnnnnnnnnnnnnnnnnnnnnnnnnnnnnnnnnnnnnnnggggtgtttccagattcagggagctcctccttgtctgtgtgtgtctaccccaagcaggcaggcacaggcctggggaggtcagggtgaatgatggtttggacggggactgggtaagggcagaggctcactcacctcgttcctgggtcggtctcatatctgggtccatcagcagaaagggaataaagagaaaatattaagaacagcaaaggaaaaaggccaagtaacatataaagacaaaccaatcagaatcacacccgacttctcagtggaaactctgaaagccagaaggtcttggatagataccctacaagcactaagggagcatggatgtaaacccagactactgtacccagtaaaactttcaatcactatagatggagaaaacaagatattccatgacaaaaacagatttaaacaatacatatccacaaatccagcactccatagcatccaagctcaaatacccagttaatccttcataattatatctttgagcatcaaatttttatttcttttttattaactttttcaactaattttaccaaacacaagaagaaacaggagggtgaaatccacacacaatgacaccaccaacaataaatccaaaacaaacaagaaccaacattcaatggacattaatatccctaaatgtcaatggtcttaacttacccataaaaataaaaagctataggctaacagaatggctgtggagacagaatccatccttctgctgtttacaagaaacacacctcaatttcaaacacaggtgatacctcatagtaaaaggatgggaaaagattttccaatcaaatgcgctcaagaaacaagctggtgtagcaatcctaatgtctaacaaattagactttaaactaaaatcaatcaaaagagatgaagaagggcatttcatactcatcacaggaaaagtcnnnnnnnnnnnnnnnnnnnnnnnnnnnnnnnnnnnnnnnnnnnnnnnnnnnnnnnnnnnnnnnnnnnnnnnnnnnnnnnnnnnnnnnnnnnnnnnnnnnnnnnnnnnnnnnnnnnnnnnnnnnnnnnnnnnnnnnnnnnnnnnnnnnnnnnnnnnnnnnnnnnnnnnnnnnnnnnnnnnnnnnnnnnnnnnnnnnnnnnnnnnnnnataaagaaacaaaggatctgacagaagttttgacccaactgggtttaacagatatctatagaacattccatccaaacacaaaagaatataccttcttctcagcaccacatggaaccttctcaaaaattgaccacatggttggcagcaaagcaaacctccacagttacaaaagaattgaaattaccctctgtatcttatcaccatgcattaaagctagaattcaacagcaatacaaattgcagaaaacctacatacgtgtggaaaatgaataacacccaattgcaccattcctgggttgaggaagaaataaaaaaagaaattaaagacttcctagaatttaatgagaatacccacaacatacccaaacttatgggacactctgaaagcagtgctaagaggaaagttcatagcactaagtgcccacatgaagaaactggaggaaagtcacattagagaattgacagaacaactgaaagttttagagcaaaaagaagcaaacacaccaaggagttgtagacaccaggaaataatcaacctgagagccgaaatcaacaaagtagaaactaggaaaacagtacnnnnnnnnnnnnnnnnnnnnnnnnnnnnnnnnnnnnnnnnnnnnnnnnnnnnnnnnnnnnnnnnnnnnnnnnnnnnnnnnnnnnnnnnnnnnnnnnnnnnnnnnnnnnnnnnnnnnnnnnnnnnnnnnnnnnnnnnnnnnnnnnnnnnnnnnnnnnnnnnnnnnnnnnnnnnnnnnnnnnnnnnnnnnnnnnnnnnnnnnnnnnnnnnnnnnnnnnnnnnnnnnnnnnnnnnnnnnnnnnnnnnnnnnnnnnnnnnnnnnnnnnnnnnnnnnnnnnnnnnnnnnnnnnnnnnnnnnnnnnnnnnnnnnnnnnnnnnnnnnnnnnnnnnnnnnnnnnnnnnnnnnnnnnnnnnnnnnnnnnnnnnnnnnnnnnnnnnnnnnnnnnnnnnnnnnnnnnnnnnnnnnnnnnnnnnnnnnnnnnnnnnnnnnnnnnnnnnnnnnnnnnnnnnnnnnnnnnnnnnnnnnnnnnnnnnnnnnnnnnnnnnnnnnnnnnnnnnnnnnnnnnnnnnnnnnnnnnnnnnnnnnnnnnnnnnnnnnnnnnnnnnnnnnnnnnnnnnnnnnnnnnnnnnnnnnnnnnnnnnnnnnnnnnnnnnnnnnnnnnnnnnnnnnnnnnnnnnnnnnnnnnnnnnnnnnnnnnnnnnnnnnnnnnnnnnnnnnnnnnnnnnnnnnnnnnnnnnnnnnnnnnnnnnnnnnnnnnnnnnnnnnnnnnnnnnnnnnnnnnnnnnnnnnnnnnnnnnnnnnnnnnnnnnnnnnnnnnnnnnnnnnnnnnnnnnnnnnnnnnnnnnnnnnnnnnnnnnnnnnnnnnnnnnnnnnnnnnnnnnnnnnnnnnnnnnnnnnnnnnnnnnnnnnnnnnnnnnnnnnnnnnnnnnnnnnnnnnnnnnnnnnnnnnnnnnnnnnnnnnnnnnnnnnnnnnnnnnnnnnnnnnnnnnnnnnnnnnnnnnnnnnnnnnnnnnnnnnnnnnnnnnnnnnnnnnnnnnnnnnnnnnnnnnnnnnnnnnnnnnnnnnnnnnnnnnnnnnnnnnnnnnnnnnnnnnnnnnnnnnnnnnnnnnnnnnnnnnnnnnnnnnnnnnnnnnnnnnnnnnnnnnnnnnnnnnnnnnnnnnnnnnnnnnnnnnnnnnnnnnnnnnnnnnnnnnnnnnnnnnnnnnnnnnnnnnnnnnnnnnnnnnnnnnnnnnnnnnnnnnnnnnnnnnnnnnnnnnnnnnnnnnnnnnnnnnnnnnnnnnnnnnnnnnnnnnnnnnnnnnnnnnnnnnnnnnnnnnnnnnnnnnnnnnnnnnnnnnnnnnnnnnnnnnnnnnnnnnnnnnnnnnnnnnnnnnnnnnnnnnnnnnnnnnnnnnnnnnnnnnnnnnnnnnnnnnnnnnnnnnnnnnnnnnnnnnnnnnnnnnnnnnnnnnnnnnnnnnnnnnnnnnnnnnnnnnnnnnnnnnnnnnnnnnnnnnnnnnnnnnnnnnnnnnnnnnnnnnnnnnnnnnnnnnnnnnnnnnnnnnnnnnnnnnnnnnnnnnnnnnnnnnnnnnnnnnnnnnnnnnnnnnnnnnnnnnnnnnnnnnnnnnnnnnnnnnnnnnnnnnnnnnnnnnnnnnnnnnnnnnnnnnnnnnnnnnnnnnnnnnnnnnnnnnnnnnnnnnnnnnnnnnnnnnnnnnnnnnnnnnnnnnnnnnnnnnnnnnnnnnnnnnnnnnnnnnnnnnnnnnnnnnnnnnnnnnnnnnnnnnnnnnnnnnnnnnnnnnnnnnnnnnnnnnnnnnnnnnnnnnnnnnnnnnnnnnnnnnnnnnnnnnnnnnnnnnnnnnnnnnnnnnnnnnnnnnnnnnnnnnnnnnnnnnnnnnnnnnnnnnnnnnnnnnnnnnnnnnnnnnnnnnnnnnnnnnctcaactttatatggaaaaataaaaaacccaggatagccaaaacaactctttacaataaaggatcttctggaggcatcaccatccccgacttcaagctctactatagagccatagttttgaaaacagcttggtattagcacaaaaatagacagatagaccaatggaatcaaattgaaaaccctgatactaacccatgcacctacgaataccttatttttgacaaatgtgctaaatctatacaatggaaaaaaagatagcatcttcaacaaatggtgctggcacagttggattcggacatgcagaagagtccagatagatccatacctgtcatcatgcacaaaacttaagtgcaaatggatcaaagatctcaccataaatccagccacactgaatcttctagaagagaaagtgggaattacccttgaacaaattggcacaggagaccgcttcctgaacattacgccagtagcacagacactgaggtctgcaattaataaatgggacctcctnnnnnnnnnnnnnnnnnnnnnnnnnnnnnnnnnnnnnnnnnnnnnnnnnnnnnnnnnnnnnnnnnnnnnnnnnnnnnnnnnnnnnnnnnnnnnnnnnnnnnnnnnnnnnnnnnnnnnnnnnnnnnnnnnnnnnnnnnnnnnnnnnnnnnnnnnnnnnnnnnnnnnnnnnnnnnnnnnnnnnnnnnnnnnnnnnnnnnnnnnnnnnnnnnnnnnnnnnnnnnnnnnnnnnnnnnnnnnnnnnnnnnnnnnnnnnnnnnnnnnnnnnnnnnnnnnnnnnnnnnnnnnnnnnnnnnnnnnnnnnnnnnnnnnnnnnnnnnnnnnnnnnnnnnnnnnnnnnnnnnnnnnnnnnnnnnnnnnnnnnnnnnnnnnnnnnnnnnnnnnnnnnnnnnnnnnnnnnnnnnnnnnnnnnnnnnnnnnnnnnnnnnnnnnnnnnnnnnnnnnnnnnnnnnnnnnnnnnnnnnnnnnnnnnnnnnnnnnnnnnnnnnnnnnnnnnnnnnnnnnnnnnaaaaagcaatggaatcttgaaattcgcaggcaaatggatggaactagaagaaaccatcctgagtgaggtaacccagtcacaaaaagacaaacatggtatgtactcactcatatatgaattttagacatagagcaaaggattaccagcctataatcctcttcaccaaagaaactaggaaacatgaaggactctaagggataaatgatccccagaaatgggaagtggtatgaactcctgaactaattgggagcatgagggtaggtgagagggagctgctacaataagagcaagagaagaggaatagaggagaggnnnnnnnnnnctgatccagacccctgaacatggatgtcaataaggaggactctgtactccagggagcctctggtggtggattagtatttttccctggtgcaagaagggactttgagagcccatcccagagtgaagggttacactctggccctggacacatggggaaggtcccaggaccagcaccggaagatttggtggactttgcagagcccccgttagggccctaccctgcctgggtggatggggtgaggggtaggttgggggtggtggaggagggatggggatgaggggagggagagggagaagggacttacatgtgaaacaagcttgttccctaactagaactaataaataaattaaaaaaaagatatccctaaagtatctaggcctgattaattcagcagttgcttttataccatgtctctcaacagctgccattcactcaccagcattcaaaaaattcaaagtcaacaagatatcatacaggatccagatgccttgtgtatttcccatctttgcatagcttgttctttttgtattactttactctttctttgaagactttacttagtcatttttaaactatttatttttcctatgactgtctatacccattttcttttctttcttaagtgcctatgcacactgaacctgtttaaaggtattttcagtctggacctgttttactatgcacctgtatcattctctgactatgtgagtcaaaccataaaaggctaagccacagctaggccttctgcctcctccttggaggcgttaagagtcaggccttaagtctgtgggcctggccaagagctgggagctattttactgcgagctatggctatctgaaaggtgcattaaaccaccccagctccagaaagttggtgcctacactgtcacaggcatttttacttatcttgctgtttctgcatagcatgttggctgcttacatgctctgctgtacagcagaacctcctaaagggctcacctcttaaaggagctgtatcctttgtttgtttttctttttcagccttctcaggcccaatgtggaaatttgggtctcacattgtatgccatttgacactgaaattttctttgggctgcaaagacacagacacttatgaatgctccgcccttagcttatgcttgtcccactagctcttataacttaatttaacctgtttctattattctacattttgcctacattcttttttttaacctttctttcattctgtatgtcctgctttcctactccctccatctctgactgtctggctgtttagctgacccttggtgtctccctgacatctctttttctttcttttttcaagcctaaattcctcctcctacttattatcccttctcagaagtcccaccttacctcctccctcattattggctgttcagctttttattagaccaatcaggtgttttaggcaggcaaggtaaaacagtgatacatctttatataattaaacaaatgcaacacatttattcatagttaaacaaatattctgtaacacattctccctttatgttaagatattttcatgaacattatcaaatcacaacaatttttaaatgtgtgctacatccatctattcattcatcttaatatcttgttgaactcctatctcacaccatggcctcttgtacatgtttggaaaacactggttggtaaagttgatagattacatacatcctgtacaattaaggaacataccattgcataatgaacaatagacaataatgtattgattatattatttttattttaattagaaagaaaattattttacatgccaatcccaggtccctctctctcccctcctcccctccccccaactaacaccctgcctatcccataccctttctgctccccaaggaggccttccttaggggggtcttcaaagtctgtcatattctttgagatagggcctaggccaacccccttgtgtctaggctcagggagtatccctccatgtgggatgggctcccaaagtccactcctatgctagagataagtactggtccactacaagaggccccatagatttccaaggtctcctcactccagacacccacattcagagggtctggatcagtctcatcctggtttcccagctatcagtctggggtccaagagctcccccttgttcaggtctgctgtttctgtgggtttcaccagcttggtcttgacccttttgctcatcagtcctccttctctgcaactggatttcagttcagttcaaggtttagctgtgggtgtctgcttcttcttccaccagctgctggatgaaggctatacgatggcatatgaattagtcatcaatcccattatcaggagagggcatttaaggtagcctctcctctgttgcttagattgttaattggtgtcatctttgaagctctccagacatttccctagtgcctgatttctctttaatattgattatattataagtagatgatacaaggtataagaaagacaaaagaaaataaaagaaatttgagtgcatgtaaagagtttaaatagtatatacaaagtagtcaagacgaaggagaaatctggttgcaattgttcttagaaaaagtatgtcaaattcattggctatggcaagaaagactgaagcaaaaataagctttatattattttgattgaattttatcttcaattctgaatgtttcaaactgatgtcagccttttgtgaagatacgtgtgtttttaatagcattcatctcaaaatgggaacttcatttaagttcaggaagaggtgactgctggtgtattcctattcattgtcatgggttggagcagacattcaaggcaattcacaccacataaatgtgaggcacattaggcagtgaatgttagttacttgggataggtaccaaagcttggcagttcatacaacactctccaagaaattcaatgacaatatatcaagatgtaatctcttccaggacaaattcatccttccccatatgccagcaatcttttatctgcttcccagtgcttggagcaatatatcaggaagtcacaagaaagtggtgaatgtgaaagtcattttaatgaatcaaaggaagacagcagcctgtgtacagcagtggagtttagtaatggggctcaaactgagacaaatcattttcttaatggaaaaatgactactgttcaattaaattatagtcatagaggccatatcacctgggaagatgaactgaatgaatttaaatcgagaaacagtttatctctaaaatatgtacatcataaaagaagaaaagactgtggggatagattttaagggttcttaaaaaaaatagccatggagatcttcagttagttccaaaaatgtagcaatgctcaatctgctgtcccttttcagtctcacccacactggtaggtctctcttaaagcaacagcagtgttagcatattagactcatgcttcttgccaggcattcaatgcttacatgggtcattttatttcatactcacatttgaacacatgcatgtttgcatttatgtgcacatgatttgaatagatgggaagagatgaaaaaaaccaccccaaaccccattattttatattatcaatatgtgctaattaaaagttttaaagaagtttggtgtggtgactcatgagtgtttgcaatcccaacaattgagagactgaggtcagaaagactgcaatgaatttgaagccagcctgggctttatagcaatctcctggccaacttgagctacaaaattggactttgtctcaaaacataaaaaaagagaaagaaaaagagaaagaaaggaagaaaacataaaatggatatttttaaaaagaaggaacactaactgcattcccacatttacagaagtcccagagaggataggtagtctaaatttactctgcaccaagaaactcaggactgctacctctgtggagccatttgctactcacgagaggtcactgcaatcactgctcttagaaattgttttattgtttataacaattcatacttgatttaattatatcagaatgttaagatagtacttatcccaattttccttatatatttcagtctatggtactgttgtagctgcagatttggggaagggtatgcagccaggatattctccaaacactagcccaatggtaaccatctggagaccctaggtcaaacaagatggaagtgggaactaacacccaaggtgatctccataacacatgaaggcacacacacacacacacacacacacacacacacacacacacacacacacacacacacgccatatttccttgcctatatttcctcctttgttccatgcatctttctttccttgctgtgttctatagatgactgcttactttcatcatgcaataatatcattagtcagtcccatctcattaggatgtcatgttgtcactctgatttatagacaaagggaacatcattcagagatacaaatcctgggacctaggatgtcctctttagtgactgtgtttttatctgtgtctagggtgattttattatggctggcagcatatatcttgtattgctaaagctgttatttggaatttgaagtagcaattgggtagtgcttatgaaggcagaatagctgaaggaatgacctatggtggatataataatgcatggtatccagtgtcttatgtattctttatgaaccttcagaggataaaagctgaaatacatttttcagacttctttgaatgtaggaatctagatgtgacttcagttgcatcagttagacacacacatgaccaagtgaggcaggacacctttttgctgtttggctttaactctgaaagtctgtttctccatccctacactgcagcttgttaatagaactgcatcagttctcatggcagcatcccaggtccccactttgctcatttaatcacgttgtgtatctttttcctatggtttcttttcttgtctgggtcatgctgtcctctgctgattcaaatctttacatcttatctctggttcttctgatggtaaaatcttaccttatggaaaacactatgtaagattggactacttattcaaattttttactgctccagtctatagagcatgattatattagatcttcctctcctggggtggaacatacttcttatgccagagtatgaatgaaatgatgaaggttctgtacacaaagaagttttaaaaactttgtttcattctgggctctcatatctccgtagtttcagtcaactgcactcagccattctgaagatatttcctggaaagttccagaaaggatacattttaaagggcatgccatcctgcctagctggtggaatctcaagctaccttttccctgtgcaagatgagaatcaaatcactgaatagtcataagaaaactagccatgtctcagatagggctacccctttgtttagtgtctcagaaagaagttgtatagagcataatcataggacatgtgcagctgccaactaattatagagagaagcaagtctttctcagcactcattctgggattcagggattgttatcacagtgtactgtagtaaagctcagtggtgtttcaattccttcctcactcccaggctaattcactgattattatctctgcctgtctctgtttatagacagacagatgaataggtagatggacagatggatgggtagacagacagataggagtttctagtctaggattgctttcaaatctctgtgtagctgaggatgacctttcttcttgtgatgatacatgatgctatcatgtccctataatgagatggaggtgagtgacattgtggtatagcggtgggccactatgtcagggtttcttatcacatggactaaagtactgacattacaacactctatctgaaaatggagatggttactaagtgactagacagtgatttgattcttatcttgcaaaggaagaaggtagcatgagattccattagctggccatatggcatgtcctttaaaaatgtatcctttctggaattttccaggtactatcttcagtatggttgagtacagttgcctgaaactatggagatatgagagcccagatttggagaagctattgtagataattaaaaggtcaatgtatgcttgctatttttaatgactatgtttatttgtcttgagagaagtacacatcactatccgtatgcttcccattcatagctcatcacaccaccatctcaaaagacacttatttcctcatttacatttaaatcatctattaaacagcctttggcaagacgtaacacacctatagatagagggtttttttgttttgttttgtttttttcaagacagggtttctctgtgtagctttggaacctatcctggcactcgctctgtagaccaggctggcctcgaactcacagagatccacctgcctctgcctcccgagtgctgggattaaaggcgagcaccaccaacgcctggcaatgcagtcatttttgaattatgactgataatcagtgtctataaccagaaaatgttgtcagttcattagaaaaagatgaaaacgtgaatttttcatggagtactgtatcacatacatctagaaagaaatttgaccttatatttttacatactcttcgtgttttaaacttttgttttttagcaattattttttatgctatttctaaaagtattgattggtgattgaaattaaaagcctaaaaatcatcttctccacaggcaatttgagaaatacctgcctaagttaaacactagacatttggaggggacctttaaaattaaccatttaacgtaagatagtgtatcctgactctaagttgattattgtagcagctcttgtatgcatggatgtgtgccatgtatgtatgcatgtggatggacatacacacgtgtgcatttggaagtcagtgtcttccccagtctctcttcatcttatccattgaggcagagtctctcccttaaactcagaacttaatggttcaggtagccgagccagctacgatgtgccatatttatggtgggatgaccacgcccatcagcatttacctgggtgttggggatctgaactctgggcctcatgcttatacagcaagcaatttacccagtcagccacctctccaacacccccattttaaatgtgcatatgtacgtttgtgggtattgtacttgtccaggggcacatgctcttgtgcattgaggacacctgtgcctcaggtgcctgtcctagtttgattctttgctgctgtgagaaacaccatggccaaaagcatcctgtggaggaaagcatactgtgatggcttacatgctgtcacagtccatcattgaggtaatcaggaacaacaaaggaaagccgtttactggcttgctttacctgacctgcttagcttgtttctatccctccttggagggatggtgctgcccattagtggtctgcctgctcatatccatcactaatcaagaaaatgctgcacaggcatgcccatgggccgatctgatggggataattccttaattggggttctttcatcccaggtgactctagtttgtatcaagttgacagaaactgaacagcacactacccctcttgttttgtgagaccgactcgctcacttttacctgaactcagtgaactcattctggattcagggattgttatcacagtgcactgttgtaaagctcacggatgtgtcaatttcttcctcgctcccaggctcatttggataggctgactggccagagagaaccaggaatacactctcctctgggccgtgagattacaagcaggccactaaactcagctttctttctttatgtaggttcttaggagatggagttcaggtcctcatggtaaagcaagcactttactaaaccatctttccaagccctgatgttaagttattcttattttaaaaaatgagatcattgagctgcaggaagtcttaggttcatttctcttaggtatttgacataacaagcaatgtgtaagataaggaatgcagcaatttaactttcatttgcaattgaagtattctttgctttttaaatcttcatcattcaggatagaagtaaagctagagtgcagtaggaaaagaaacagtagcaacagatttatttaccaagagcttcctgtgcaactgactattaagaaaaacaacctgttctgtgttttcagagatgagaaacaaacattcagagcaagcttttgccaacagcataggattgcaatgcaggctttctggtttatttcttgatccatttaacacagttccataataatcactggagagggccatgcacaagtttatagcagtcaacacaaggctaaaataaaacgggttcatccttcttcaacatgaacaagctgaagtatcaagtcattatgactcagcacttagcaatgttgatggggcagagaagcaactgatgcattctttcagatattctttcagactcttacagatatttatgcttgtcaaagtgtttcatttgactacttatcctgttggcctatcagagaggtacaattaagatctcttgaaaaattagagataaaaataattgcttgccatctgtcctttatggaaaatggaagagaaccagaacttgggaggcagagacaggtggatctctgtgagttcaaggccagcctggtctacaaaaagcaagtactagaacaggctccaaggctacagaaaatccctgtcttgaaaaaccaaccccccccccaaaaaaaaatggcagagaaaggctaattcttttgaggctaattgttgaactggcctgcctccatcttgggcctgaaagccattttatgttaaagacaaactaggttcattcctgtttatgattaaatgtgtttgtcaaggattgggctatgccccacctgtagccttaactacaactggttctgtactgcctgttccaggaaacagcaaccatgcttttgtttcaaaaaggttgtcattattacctgttgttatgaccaccttgcaatcatgcctttatttcaggagattgttatgaccaacttgttatgcttatttattttctgcttctgtaaccccacctatttgcctgttataaaaaccttattatttcccacttccaaggctgatttgttgaaccccatctttagggagagacagttcatttacacaaataaaaagtttgctctaattaattacctaattaatttgcccatgaagatttgagtcagaggtctttctcctcgaatatgtaggattaacataatcaatcacatattcattcattcatcattcattcataatttttctagtttatatagaacacaattgagataggttgatcttgtggagaatgtactcacagattgttaaggttttggatctgaaatatctcccataggctctatgctctaaaggctaggttgtcaaatgatagtttccctgggagacagtgggaactttaggaggaggggagtagttagtcccctttaaaggtggactataacctccttccttatctccctccattcctccttaccttctttctggtcacctggagacgaaagatttttctaccatatgttccttgctaggatgttctcttttatcacaggctcaaaacatggagtctagtgaccatggactggaatccatctttcataaatgttacagtaaagaaaagctagcacacaaattatttccttggttccataaattaaggttttcattaaaagaaatcaagtaattgtattaaagtaaatctaacttgcatcagcacaattatatttatcttagcaaagaatatttaaaagattcttttatttacagaagtaatttttgcattaattttaccttccatatgtatgaggtgactgaggcagagtcacagttagaaacattcctctaatactatccttgttgtgtcccgaggaacagaaagtcagtggcattaacatttccctttacccagttcctgttcccttatcacattccatctccacactcccttcctgcttttcaagggaatctgaaggagcacagggtatggagaggtaagtgtgtcctctattttaaacacagctccagcagtgttctaattcttttggtgaatttaccggtttctccctcacggtctcttcactcctcttcctacactttatgggttggtgtctcagtacttagaagctatagacacacgccaagccacgctaaccatacatactctcacaggaggcctgaaaacttcaactccactctcgttctcctttgtataatggtcagagctgaaatataaacatgattttcagcgttttccctcccgtcccccactaggggtagctgttattacctttctcttaccaaccattatgttaatggtctgtgatcctttagttttctttcctaacagctaccatgtattaaagttgtaagattgtttatatacacgcacccattggctactgctgagtgcgtcttcttaagcactgttttaggcattttacattatgccaacccctattcggtgaggccaataatacacttgcacagaaggaagctgacgtaaatgcgaggtaggtgaaggcagtggcatctgagcctgccaggcttcactgctgcctttacacaacggattcttacctcgggtacgctgcaccttttgctactccaacctcacccttcaacacttctgtccctccatctccccaggtttctccctcctccctccccacctcatgccataggctgccctcgttcctcgactccaccgctcccaagccttcccatccccgggtctgctctctgacacaaacgggcgttgccttccttcaggaaatttccctcttagctcaaagcctccaccccgctcgccggctccccctcttcacgcaagactcacgccgggcggccagggcgcacgcgcaaggcccggcgtttcagggcccgggggtcccggctcccaacagcccccgcgcgcggtgcaggctgggtgaacatggccgcttccggtctcgcactcaggctggcgcggcactgacggcggggggggaacatacttcttatgccagagtatgaatgaaatgatgaaggttctgtacacaagagaagcagccccgggcagccagtgcgagcatggagagcccggcagagccatgccaagaagcttcgctgggtcctcggcgtgagagctgaaaatgcagtttcttggtggccgatgcccttcttattcctgcttcattcccgctcgtggtggtttttacttcaacaggagttctgttgtcgagggcttgacgttttcactcttctgccctccctgtcacagggtttgggggccagcacatgaccagacaggtggcctgtggggacgttcagagagacaagactgcttcggtttaaagtggggcggggacgcagagtctcacacagccagtttcttagttcaaacatgagtgacattgccaacatagtgcacattatatgtggtgtctgtttgggacattctttaattaactgtaggtagtagcctcattctagaaacttgttagcttcattttaagtttaatgtaggccaacagtcacaggtgattatcatgtacaggcagggtagactatgctatttctattagtgtattttcaagttttgttttgttagtctacggagtacaaagtactacaagccaagtatggatgtttgactgtgtggtagctcagctttttctgacctgtcactctaaagttgtactttatttttttgtttttattaagaacttgaataaattatcttataactttgctttcgtatactccacaaaataatctttaacactgcctaatgtatcacacaatttctttcacccagtagactgataacattgagtactatttaaatttttttttatgtgtgtgcttgcatgagtttttgtgtaccacatccatgcaggagcccaggaagtcataaggggtatcaggtttccttaaactggagggacagggcagatgtaaccctcctgtaggtgctgggaactgaaccctggttttctgcaagagcaggaagtgctctcaactgctgagccatctcactcatcagctctgacttaaatttctattgagtttagctacaaggaaaactatacaaaaatcattaccttctatttgttggaaaatagtaactatttcctcagcttagcaaaaaacttcaaatttataactgaagtcgataaaactctcatctctgatggtctcaaatacttctattatgagatgaatttagttgaatattgtttgaatagttaattgatagtgttctttctgggaagaatataaatatgaaaatgaactctgtatctagttacaggggccattgtttttattttaataattttttttttctgaaacaaggtttctctgtagctttggagcctgtcctggaaccctctctgtaggccaggatggcctcgaattcacagagatctgtctctctctatctcctgagtgctgggattatattcagttgaagttgcttgaaaggaagtctgtagttccctactgaaagtatgttgtcttgatggagcgtgtgagtccttttaggttgtgctggtttaactttgccttctgggtcaacatagatctgatacttttggctttaaaagacctcttttttctttattcagatagtttctaatcaatggtagtaagcagtatgtgtgataaatcttgctttttattgccttctttaggcagctcttgcatactctgcacacatatagctccccatccctaggatgttgggacagactttaacataattttagttttgttggtcttgctctcattcttggtgtaagtaggactctacagaatataaatataaatgctctactataggccagttatgaagactcggatagacctgaccttcagcaatgtaccgtactattttaccacctacatctggtttccatcttctgggctgtgtactatagattgcactgtctgagtaggtttctttgatgtctgcttttttacagtgtgtagtcagatggtaagacgctgcgtctagtaggtgctctgaacattggaacaaaggaatggtgcatgtttcaccgctggtcttccttgctgtcctcattcaacaaaagactttcctgttgtgattgacctgaacagttgcaaactcatgttcatcctcagctttcttgtatgtgagccacaaggcaccctgtgtggtctttattggcagcattctcttttctatgtgtggtccttttgttatgtcctcctcaccttgtttgtcatcttctaatcttgattactttgactccctcttctctaattttccatgttagtcattttaatgtatctttttttcatcatcatatattcttgtgctgtagttactctgggtaatacttgcttgtctctggttattttggttttatcagttttctagttgacaaataatttagcatgcatgttccatgtcccatatttatgcttaacttcattaacaaaataagaagatttacacatgctgaagatcattcacagctgattgctttttgttttgagaaagactcactgtgtagcccagtctcgctttgagctaaaaaattttctgccttagtctcgtgagttttgtgattacagttgtgcactctctctcctacccttcaacgtaattgcattttttaaattgcatgtctttcttaacattatcatcatttgaaaatagtgaatcctgggttaccatttctgtgaattttaattatagttttaagagtttccaggatgcctaaagcatattttgtttcaaaatctcatctgtagttttaactttaaggacatttgaaagtgatatattggtaggaaatgtgcttccaggttttttcagtggtgatggatttgtatacaatcacattcttatccattcacatcatgactcatcgtgcgttttctgaggcctctgtccagaactagtgttagaagttacaacttcaggacagagtgactatctggttgattgtctcccttgacattgttattaccggcactgagtcaggcacttacaatcagtggtaatctaaaaattattttggaattcattattcctaaaccctaaaagaacttttaatttctatgtaaggcccaatagtattgtgaactaaccagtacttattatcaagagttttaaaagcccgattactattcaaaatatgacagttaatcctgaagcagagattgtatcctgtgtacttttttgttgttgttattgttactaaatctcatctttaaaggacattttctgaatatttattattttcagttgtgaataacacaagtcaaaactgtagactctaggacttttcctaaaaatagggatcctaatgtaatgcatcacactaagatacatttataaaaatgttataatggagaaattatgtgagagcataaataaacaaaccagtgcaaccagcattgcacccaagggaaggaaataactctggagggtacacaggtccagaaggcaggaagtttattttggaaagattccaaattaatgctattgtattaaaaaccacgagggcctaagattgcatgtgattctgggttttgaagagtggaaattctcctattctagtgtggaatgttttccattttagggaaaatgtcttggaatatgtcttattatctttatgccataaatggctgaatctcctaaagagatgctaataaaggacctggaatgattttataaggctgatttctacaggaagtcaggttaaaaatgggactctacaaagtgatgatgtcaggaggtttcagatactcagagtacaggggactgtggaagatgtcctctgagtggacagtcatcatttcagtcctctttcctgcagctctgtaacacagctaactgcttatctttcccactgtaacatacttggagaccactaaaagaacaagctgcacagctcttccttgcttggtacataggatccatggtaggaaccactttctttcacagactattgctactgtgaatatccttgaactctttgagctatgctcagtaatagtataaggtcccgaggaaactaatccttagggctctgcctctccgtgacatacccaccacggttatgctaaccaatgagacattttccatgagttccataaatgcttgctgttcttctcacatagtctgtgacactgcagaattcctgttcctgatggcagcaaatgagtggttctgtctcaccttgagtttgtgcctttgtaaaaaggacaataattaataggtcagtcattgagctataactttcttgacctaagcaaagatgcctgcctgtaaaggtaaaaaacaaagttaataaatcttattttattaatactaaaaatattctttcattatattaaagggggtaataaaaatagaaacattcagggtaagttttgcttttcacatgatagttgttacagtaacaaattaatagagttagtaaacagcataatgtagataatagccctgaatgtttgttttaggcttactgtgtgtggactgtggcactaagttacttatgtgtttttctcagataagtctgtgtaagctagacagtatacattttccattttacagagaagagaactgaaggttagagtgggttggccgtggagtccaggtctgtgtgatggaagtgactgtgcctgaagattaggtacctgtggttcagacagctttgcagttagaggacaattcctgcacagattgacactggttgcagaggtattttcttgcatgttagtgaattgagttttttttttagctttgaatattccttttttcacacagaaagcaagatgcctggtgattgtgtagttttcatttgcaaggacagttttacatttggaggtcacatgaattatgcaagtaaagctttttcccttccttccctgcccctccgactttgcacagtcatttagaatacttaactctagggctcattcagtgtctgaacccctaagttcctttgtgtttgtttacagttaatgtgttaagagccattgacatttgaagatcatcagaagtgaagataaaagatctcaaaaattataatgtaagtgaatgggaaactacaaaaattggacagaaattaatattgccaataataacctttggaatcctatattaccccaaatgaaatttgttcatatgagtaatcagtaacttcaaacgttagtgccatgttccagtccagaacatccttttgtctggggaaagcagtcattaagttttagtcacccagtaattttccattggggtatgcgggtgcctctgtgtacttcctcccttttcttctctaggactttgaagtttgatgtgagaacaggatgaatagggaacaaattatatttatgtggagagtttgttttctggcagcagatacatacatacagatacatagataaccattttgtgtgtcttagtcataaagagtaagctgtttcctcccttcccaccttctcctttcatcccttcatttctctctgatctgttgagtattcactatgtctgtttatgatatgggctagatcctacatttttcccctcctgagacagggcttaatgtagcccagcctggcttcaaactcactttgcagcttagtgtggacatgacttctgatcctcttgcttctttctaccactcgagtacgaggactacagaagattgttgcacttgagtttggaaattcttcagaccaaactgtgggctttttaaatgccaggcaagctctctaccaattagtttccttaattcttgatagcttggtgctatgacagctatattactgttaggtacatcaggaccactcagtgcttttcagatgctctggagacctgcacattctagttcaggtggtgtttggtgaacatgtggtttgcagtttctagccattctgaaacacagggaacagatccaagaatctgtactgaatgaagtctgagaaccatcagttcagatgctttttggagtcctagtccaactccaagagtttgaagatgagggaaaggcattgggaagtttatttatccaaagacacagttaatttttggaggctgggaaaagttaagtgttttttctttgaagccttcacaggtcatgttgtatgttttgtttggctagacagccttgctatgcttagtgtttataagcccttcctccatctcacatactagtatcataaccagtccaccattgtacctggaaaaacctagaagcctgaagatcacagtttctgagtctttagccagatgtatggctgattgtgactttgaaataatcattgggtaatagtttgggtggagaaagagcactttttttgtaggtcagactttcatagtcttgtctggattgaggttctatgcttctgacgatctgacttcttttcgtagagtctgtaagtgggaagtatgggctagctgtgttgtgagcagctctgttcattgtttttctccccttgggctctgtgaagcacagtgttaggagttgttgagttaactgtttatggagccacagatacagccattgatattaactcatatttgtaatattttgtaacagtatatttgtaatactttggtatttattgaaaactctaaggaatattttgaaccatatgttttgacttaattttattactttacatattttatatcgtgtcttatagttcttgagttgtaccttgtattcatagatgaagtttacccagttaaaaaaaaataccctgttatgttggaaacatgaaaaagttggattatataatgttactactcagtttctgagtgttttgatatatgtcttaaaggatgcttttcagatgttaataatttgcttttgtgatgtgggaaccaagctgaagcttgaagttgctcaaagtgcttcttgtaagttgttgttcacctctgcacacatattatcattggcttcatagatcccaattcattatcattggttttgtaaactataggctcaaatttgcaaatagatcatctctcaaagggaacttagtctgggagtatagctcattggtaaaaccaatgttaggcattcccaggttcagtccccagcatcataaaggaaaaagaaagaaaaatgggactttattatgtaatgttaattcccttccaaagacatttacttaagtaatttcatacatgcagaaagatacttcagaatgacactatatttctaggataacctgggaaatgtttgaaaaactagaatgtcatagttttaatgtaactgctacctatggagttgccttgttaattatagatgtttgccattgatttagtttaaaatcagaatgaaaaatgtatacattgatcagttgaacctgtttcttacttcttgtgctcagattttgttaagtatttaagtatgtgttattaaagtaatctttacacaagtacctaaatttctctttcattgtgtaagagtctgtgatggttaatgtcacttggtaagatctaaaatcccctgagaaatgggtacctgacatgcctgtggggagttatcttgattttgttattccatgtgggaagacccatttaaatagaggttgggaccattgtctgagcaggggagccttgtctacaaaatggagaaagtgagctgcgctctagtgcattcatctctgcttcttgactctggatgtgagtaaccagcctattgctgggactgtgcagccttgatggacatgtccctgagctgtgacttcttcaagtcgcttttgtcaggcctcttctgacagcaacagaagacactgaagcagaatcttactgataagttcaggttgtcaccttcactacttcaaatactcaacagtactatattggaagacttcttccagcaaatcttcatgaaagaaaatgattagcaaataaataaatgaatattcactcatctattcagtgtaatcacagaagctaataagcatgcaatttgtattttatggtttctcaggagagcccttattatcatgatagatacagactcagaattttccagtgtccctgctaataaaagatggaactggaatttggattttcgtataagtgtgctgttgattttttactcccaatataaattatagcgtggaagtggtaaaaagttcttgggatgtacattttgctgattaaaggaaatttcttctgttggaaagttgatgataggctcatcttgtccagtcagttccattaaagtctaactacaaagatctcatttcacctaatccttctctttctctgtattcatttaaaactacttcaaaaacataaaaaagacattcctcagtcctgtcataaaaataaagagaaaatgaaaaaagctagaagtaatgactctatggcctgttatttgtggcaaccaaccagaaatgtaagtatgtagggaaccgtgttcaaaagtatggatgcacagttgtgttttcttagtgctttggcttagtgataggaaatgagcagtaaaacccaattccacttcctcatcgtcacccagactttgaagtctgtgtggaaagttaagttaattggaaggactgtgatttgtgcagtaatagtagcgtttgtcctgggaaaggacctgcttagtttaaggcatgacacccattcatttaacagtgaattcacatatgcaagtagcatgagaagattatacaaaagtcatttattaagacacagatgggggctggtgagatggctcaggtaagagcacttgttgctcttgcagaggactcaggttcagttgtcagcacctatatggcagtttacaaccattgtaactctggttccaggagatccaaaaccttctgacctctgcaggcactaggcatgcatatggtgtacagacacacatgcaggtaaaacattcacacaaaataaacaactgtaagaatagtcttagtgggtatgtgttgttctgtgcttgccgagatcagagtgttgcccagatcaaagctttactgactaaggtgactaccagttcaggctttaggtatcttgagttacaatctgaaaaattcagtttaaaatatttctctcagttaactcatgtgtaaggaacttttcctgtaggcagcttgtgagtccacttaagtactaacttaaggtgctctctttaatacaaataataaaatagaattggaggagttattttaggacttctgtgactgtggggacaggcccggtgttggtgctagtgctggtgctcagcccttgttgctggccccacccacctcctgttgacagtcactttgattacagtgctttggtgtttgccagttctgttactgtggggaaaacaagtcttgcaggctgttaccagtataaattggttgttcagatttatgttggaattaacaggtcacatgcactgaattgatctggaaataaaatgataccaatgtaaccgtgtgttctagatgatctgttcttacttccttggaattttccaaagtgccagccggtgtcagccaaggctgtctgagctcaggtccactttgttctctgaatgaagattgatttctgtcatcagacacggtgataacacaaggtttgtgtcacctctattgtccttcagattggttacatttaaacatgtagagcaagctggagagatggcttagccgttaaatgctaggctcacaaccaaaaatataaacatggtagagcttgcacggtgtttgaaaacgaattaaaaatgtacagtactgtgttctggtgaagttgttttctgttttggagacagatattctgacagtaagttttttgtgttgcagaacacactgcaggccttttattatttaagtaaaaatttcaacagaatgactaacaagcataagcacacacaatgcttaggaaggacactagtccattgtgtgagtgttgagtgcaaaatttgcattcctagaaaatctttctcccaatcacaatacagaacacattctttaatatccgtgggcagcagcattaataacaagaaaacactctcaaaaaagtacctcttcttttcatgggatactcaacaaaaattgaattggtagtgagagaatctgtttaaacaaggcaagtggtttagatcttactgcagcagctgtggtcagctgagcctgggagtggaagaaacatggcttatcctgaaccctcttgagacttgtttatgaggagtgtgaaacacaggtgacatgactctaacttccgtgctgttttgagttaagaatgtgtgatgttagttacatttctagtatctctaattttcgattttataagaagtgtttttattgactttaggaatagtgggttaggaggaattaggggcatgaatgttggaatctgttagtgcttgggttttagtttctgtttattattgttgagtgctgacaaggattttattaacaatccagcagaccagtatgtcagagacagtactttgccattgctttcattaaaaaatactggtggtagacttgactttgtgtttgaagattggattagtgttattgaatagattgaaagttgtgcatggagtgtgtgtgtgtgtgtgtgtgtgtgtgtgtattttttaaaagttcccctagtatttatactctattataaggttgagttttggccagaaagattttgagtttagaaacttgtcagttttatattgtacatgaagacactttacagtgaagataggcttttaggtccaactggttgatttcctctctatttttaatggttccttatttatgatttcatttgttactcttctgatatggtgctcttgtatttccacaatgctgttggtgaacacttcctactagttcaatattaaacaatacttttatatagtatcaacattttataaagaatgagcttagattaagttgattaaatatatttgtctggtgtgaaaccaagattctttgactgaaagctcatgtttcagccactgggttctctgtctgtgtttcatgttttccttggtgaaccttccttctcacatttggctatgatgaggtgtgagagtgtcaaactagcacctcggttagcctgccagtctaacctactttgtacaatacatgatacacaacagcatttgttggttatgtagcaaaaagaaaaggaaagtgatttaagaaattcctgcttcctcaaatggagaagagggagagtaggagggcagttagctgaccctgccattccttagactccatttttctacaaagctgaggtggtgccttgaggtatggggatgtttgaggtggtgtgtgaaacctgctgtctgcagacattattgtttctttagcagcattaacaaaggatgcttctaggtctggtaatgtgtcagtacttctgtgggcactcagaggtgccaacattcatttgcttagcaggaattttcttaatttgcaagtttgcatctttagtcacttcaaaagaaaccccagaaaagtaggttctttaacttttgatactgttttgaaaaggacagagtaattcctgtctgtctgctgatacctggcctgtgttactgttcacatcagtgctgcactttgtggtagtagaagttttgaataggacagcaaaggaagagggcattgtggtaccacagtagatgagtagctgtatgagaatgactgagtcagatgacagggttctgtctggttctcgtggtgcgtgaagcactgccactgacagagcgcagggatggctggggatggagactgagtgctctcgctgttctgtgccctccttttttgtatatgtgcgttctgttctttcagagctatatgggattcatggagaaataagcattcaaataataccagctttattctttttatgtaggaatttggaagagtgtaatttgggctagaaagggaagagaatcttggattgacttccattttttagagtaatgatgagaatttagataaatgcattctcccaggccagtacacaaccattaagttacaccccagctgtttgtgagttgttaatggtcttctttaatacagtacagtaaaattgtaatgctgttgtgaggggtagttctcataggaaaaactgtccacctgaataatgtaaagtgtaatggacatcttggacagtgctggttatattctgaccagttttgctgtaatgcttcatcagtttctaagatttgtgctgcttatgcttcctgtgttgacctaactttactttatgcttcctgtgttgacctaactttactttctgaagagaggcattaatgctcgggggcatggagtgttgtgatcactcctgttgcacagcatagttgactctgtgttgttttgaatcttactaatatttacatgttatacagtgccttagaagttgctagttagggctttgagctttgtcagtatatgtttaataagtatgtgtatgtgtgtatgcttgtgtgttgtgtttatgtgtgtctatttgtgtatgtatttgtgtttatacatatgttgtgtttatgtgtatatatttgtttatatgtatttgcatttatgtatgtttgtgtttatatgtgtgttttatgtgtgtatatttatatgtgtatatgtgtatatgtgtgtgttcctattgaaagatatataggaatagaagattgtgattttaattttagttcataactctgcttcctggctcaggcaaaaaggcccacactaatcaggaataaaaaacaaataatgctgagggtcaaggctagcatttttcaaatgtttacatttgtgtgtatgtgcacagactgggagaggagagttggggactatttttgctctcaggagtggaagagttattaaacctagcttaacaaaatgatttcagtgtttgtaacagtagctctcagttcctgtcagtcttgagtcttatagtctccctctgctgacactgattatgggaactcttctgttttcttccttgatttttctttattttgagacagcatttcattaattctattagcaggctagaagttgctacctttccttgcttcctaagccttagggggcctgtccttccacatcctgccaactctggttcttggtgtttcggttgtgggcttagcctttcacaaacggatgagccatctctctatccctaactccgtttctttaaggatcagattggtagactttcacccattttaactttccacttctgtactgaactccattgtggtcaactgaggttttctaatggttagatgtccttttctagcctccgttaagtaaaataacagttggcatggtattgtttgtgaggaaatgtgctaagctgttagatgtattattgtattcatcattataagtatatgaatagctcttagcattgctaagtactcagtaggtattaactaatttatccaataagtttaaataaaattaaacctatgagtgtctatcatatgccagctattatcatagagctaggctagtgtttatcatctttcaagaaaattattaccctcctaaggaatgttttggcacatttctctgtcctatcccctcttcctcatgctcacacagtgggtatgattttatctactgtgtttgggaattaaaataataaaattttcactgattgtgttagtatatgcttgcaatgccagtacatgagcagtggagatagaagagtcagggattcaagactagcttgggctacataaaactttatctcagaaaccaaaataacatttaaaatttgttgttggtttttttttttttttttggccctacctcagtgggccattttattcacacccatggggctcatattctcccattgggaatgtgtgttctggattctggggatcccataatgatcagtatcgataggatgtggaatccttaaaggtttacacttaaaagaatgtgggacacagaaaataaacacataagacacacgtgatgctgtaggtaggaaggaaggaaggaaggaaggaaggaaggaaggaaggaaggaaggttgttaatgatacattttaaatatgaactgactgtgagcagaagttcaaaaaaggccaaagggaaaaccaggaatgtttgcaagaaaagagtcatcaggagtggtacccaacggtgcctgcagggaagccatagagcaactaggagatgaggtcaggacagcagcagatagcgagacaatgcataggtcgtttgttttaagggcttcacttaccctagcattgacatgggaaggcttaggaaagttgaggagagatgaatgatgatgttggttgctgtgttaagagtgaatggaagtgcagaggcaaggcatgtgttttaggaactccttcaggagggaaatgatacactagcagaagagctgtgtcacagtgattagagaatgcatgtgtttcgaaggccaaagacgttcttgagaaaaaagtgaaaaatgtctgggtggtggtggcacatgcctttaatcccagcacttgggaggcagaggcaggcagatctctatgagtttgaggacagcctggtctacagagcgagtgccaggacaggctccaaagctacacaaagaaaccctcttcttgaaagaaaaaaaagtgaaaaacaattcaagtttttggttggaggaagcagaaacaagcatagagttagctttgggggtctgtggaggcacttaaataagtaatttgttgaaatctgagtctagggaggtctagagttgacctggaagtcagggttccctcatgtagaggtggcagtgttgaaaggcccagtgaaattattaaggagggttatcagtgtcctggacaggagcagttctattggtataataaaagccctaatgaagtggggttaagagagaaatcttgctctgtaacacaaggtggactgcaagggctttaaaaggcctaggctaggtaagaagccatgattcaggctgaatccaggctttgtgattgagaagttttctttgggttcatttggttatgtggctataggtgtggaatagcagagagctggattttatgagtttttggaattaggactaggtgttgttggatatagttcagtctagttctcagagtctgagacaggagggttcgaatagggggaagccagcctgggctgcatatcagcactatctgtcaaagggaggaaggaggaaattgagaatattagagtcgtggtgatcctggagcaacgtctttgagaaatgagagtttagctatgatctcaacagggatggtttgcatgatgtgggtttaggtcagtccactccctaggcccagacacagaggagaggtgtaggaaagtagagaagtcagagagagagagagagagagnnnnnnnnnnnnnnnnnnnnnnnnnnnnnnnnnnnnnnnnnnnnnnnnnngagagagagagagagagagagagagagagagagagttgggtgtgtgttatgaagttgtgtccttagggcaaaatctggcattaggaggcataatagatgaagaggccatttaggaagagctatagtgaatacagagtttgtgtaagaagcatgttcaagcccaggaggatgctcattccccttcagtttcatctctgtcagaagcagagaaagccaggtagaagagaccagcttctgtggcagatgtgtgtatatttcagccactcatttgttactctgtctgtaaatgcattctgtggcgctcatgtactggctgaattgttgactaactgatgcatatacctgattttaaaggaaatatttagaacagtatttgatggaatactcgttcggtacaaggtagtgttattacatgatgtaggcagtagccaggcagcctcagactgaggagtcaggctagagaagtgtaagtggcacttgggatagaaaggtggaaagtgacttcagaaaactcatctgtgttaaggaggaactagaggagaatccagaggaagatgtgacagaaccagcaaatcttaatggcaacagaagaagcgtggctagaagacatgtgacagggtgtcactgacagtcaggttgaggtattcatgttgagttcctactaaatgactagcgttacaagtctgtaatacatgtgcgtgcttcctccatgtaaaggagactagaagaggacaggttgaagagcattggagggaaaactgaccttgtgtctgaggacatttcatcatctgagatgggaaggaagagttggtttgaatgaaaggaattcactagggtggggtaggaagttgaatccagccacccctcagcacctgtttccagtcctgtcagcttagtgttttcaacgagtaacagactgtggtggcagagtaatcgataggacatcttttattgatactgggttttctgttttatttgacgactctgtaatattagctaatgctgtgtacttattttaaaactgttttggcttgtactaaactgattttccatctctgattattatttttaacttttatttctcgtctgtacaccagtagatatatagttgtatttactaaataccaaatcctttctctactccttggatcagtataatttaatggattagacttagtcactatccagctttctccatggagtaatagctttctgcttatttagtgagcagatcaatttgagtagttttgcaagaaccccaccttcagtggcatcagcattttatatatattctttttgcattccctatctgtttaaccacttgttttttctgtgactcttgtgtgtcataatatggacctttctggttgtctattaagtaacttcctgataaaccaaaattcttccagaatttttccagcttaaacctttctcagtcacatttaatgcatccttctctgtgcacctgtagcacttgtttttaaagttactcttagagcatagttaaataagtatctgcatcgctggtgcctgttccttaatagcacatctaatactgaactctgtgcatctttacagtgggaagtcatgaataagtcagcatcaagtaaatggataagtaacacatgcacaaatgcatagaaagtaagctctgagcccctctgcctcctggtacatatggcagcacacatcagctccatctgaaaaattcctagactgaatccaccagctacacacatgattcagtttgttatcatggcggagactctgagccttaggtacctggtataagtctcacaagccccaggtgtgctaaccctacatgttgtcaacactgctgctgattgttctcaaagggtgctgacaacaaaaagttaagagccactactgctgtctaatagaaaaagatttttcatagtgacattggagggactggacttgagtatgttgaccaaagacattgctgtcaagtaagagcttgctactaacttctcagttacttcccttgaagcttactgatcggagtagtaccacagattgtttaaggattatttgtccttctctctgtctttttctgtgtagccctgctgtccaggaacttgctctgtagataaggctgacctcggacacacagagatctaatcctcttgcctctgcctcccaatttctgggattaaaggatacaccaccactgcctggctatttgtccttctcttcggtctagcatctttttgtttttggtttttgtttttttgttttttttttctagacagggtttctctgtgtagctttggagcctattctggcactcgctctggagaccaggctggcctcaaactcacagagattcccttgcctctgcctcccgagtgctgggattaaaggtgtgcgccaccaatgcctggccaggctagcatcttaaaggaagtgtttgctctagtgtcttaaggaacctttgcctgggagtgcatacaaaggactccagaaagcacaaaccttccttttctttcaccctccacgtttcctcaagtttctgttttattttatctgtgcatcctcatcattgcttctaaaagagtttgatttgaatcatccattcttttgatctttattctttcacttgtgtatttatccaacaaggactttgcaagtatctgctcaatgccagttgcatgtgagagtctagggacagaatggggtaactaacattcttctttcttgacatttcccttccttcttgaaatttgcaatcttatgatatgtagccaattattaaacacttgccaagctatataggagcagattaggataagtggaaagaaagaaaacatgaagtaccgtgagcttgctctgtgggtcccacatccaatagcattcctgaggaggaagtgatgtcccaccagccagctcccaaataataacacagagacttcttattatgacagctcagcctatagcttaggcttgtacctaactagctcttataacataaattaacccatttatattaatctgcattctatcatgttgcattgcctctctgtttactctctttgtctcccaagtgcctagattcttcctcatcttcctttctctccttggaaatcccttctatacctcatgtgtagctatttggctgttcagctttttagtacaccagtcatagcaatcaatatactttcacacaatgtacaaataccccacaatatttcctcctttttatctaaataaaaagaaaggttttaactctagcaggaaagctatatacaataagaacaattatcaagtaagaattacatccacaatgtttagtccatatatatttggcaaatttggagaaagtgctgtatttatactatcttagtgagtccaaagttttatgcctaaaccattttcaaccgtaacatgtattaccatcctggaagtatctttttagaactaaaaatatcttcttagataaacaagatattatgtttctcacccttataaacttttcatctcttatgtaaatttttttttctgaatttggtaacaaggaaaactctataactgtctcatcttcaattccatcagagactggagaaatatacaatactatctgagtaaacgggaactgcagagcaagcagcttccaaaacagtataaatgacagagacatctggatgcctggacagtcatccaaggttcctctgcaacattggggcatccatcttcagcctgcaggcctacaatatctgacaaactttactgtaaagcccagcgttatcttggcaaagctcagcagcctttttcctttgtgaccagtttggacagtatattgtcagcagtcaggcaagggcagtttcttacccaaatggctaactttgccatattgaaggcaaactctatatggagtttcctcaatgcctatcatcctattatgtagtagattgatgctgctaggagcagatgtttttcactatcataaaaagccttgtgttattaaaacattttaaatgccatattctgtaggtctttgaagtgtttgaagaccatttatttaaaatatatctgaccttgaaagcatatctaatatgactataagtttgattgttatagataactaactaataacctgtcttttgttgttatcctaaatagctttcaaggactaagactttacattgcctttttaaaagagctgtgtaggcatattaccttaaacaagaatagaaacatatacagtataacaataactttaaatttgtatcaatatacaaaaatatctttaaaaagagtagaaatatatatagagtatgttctgacaaaagcaaccttaaatttgtatcagtatatacaattccataccagtgtaaaatatttgagattaatagttgctttttagttaaaagtagattcaataattcacccctttattctttcattcctatattccttttttctttttagaaagatcattgcatccaatctcccttgcttagtttcctcccttaccatgaccagtaacaatttgtaaccaacctccctaaacaatgaaaaacatccataaatcactggatgaccagaaaccacccatcccacctcttgggaatgtgggcttcatgttctttaagctgcttcctgttgtctggggctgatggcatcttcaggggatcctaagaatgttgggataatggtcaagtcctgagaaagctagctgtatttttttttttaactttgtttagtctgtgtgatgggaaagttgtagagcttatctgaagttttggctgtagtctgtgaggctggaccatctcagctagcagctttgaagatgttcttggtgcagaattttgaggaaactgtaacagaggcgttctgaggggctggatcacttgggctagttgtctttattagtgtctagtccttcatctttttctaaaaatacacaaaacttttaaaggttatacatctgtgttagcacagtatggaatgtgcagtgtgcacaagtcagctaaagatgattttttgttctatttttgaacagataaagggtatttgttagctttataagtctgtttggactgtataaccaaacctccatccatgtcatatgaaagaacggcatgtaataataagtcatgaggattctgtagccaacaagatttagcatgtctcatccagtcttaagagctgttcccataatagagggatcacctttgtctttcttggctttttcctttatgtctttagccaagatcctcaggaggtcacccaccccactcccacccccatcgaatctgatcccgattatctttgtggaaataaaagcacaacctcttccccaatgcaaccattgtccaacttccattttgaagtcaagacatccctaaaatatataagctggattaatttagcagttccttccaaaatccagagtgtctcagcagctgtcggtctctgttcattagcattcaaaaaattaaagttaacaaagtgccgtacatgatccagacaccctgtatttcccatttttatatgttttccttttatattaccttactctctctttaaagactttgttacttttaaactattttttctatgaccattctcttttctttgacatccaagtacatttttaagcacactatacctgtccagaggttttcttgatctgtgcctgacttttgcacatctacagtgttttgtgatggcattagccaaaccttaaactgctgtcggcatctctctctcgggttcccccacgagcttagctttctgcctgtgggggctgtgtttaccgccccagctctgggaatttgttgtatgtgcctgaactacgagtttgtacccagtgccagctgctcaggtgctctgctgcacagccacacatctgcatactaagcctacctaagaaactgcagtcacccggaagctgtactttttttttttttttttttttttggttttttttttttttttttttttttgtgaagctttcttaggccttatgtggttatatgtggtcccatgttgggcaccatattatgtaacaagtccttttctatcctgtcagtcagctcccaaataatggcatggagacttcttactaattatgaaagcttggcctatagcttaggcttattcccaacaagctcttagaacttaaattaacccaattatattaatctacattctaccacatggcattacctttcttctctcttgcacctcctctttcctctccatgtcttctggcatcatcaatgtgcctagattcttccacctcttcctctctccccagaaatcccatgtatacctcttgcttagctattggcctttcagctttttattacaccagtcacaacaatataccttcacacagtgtacaaacaccctacaactggtgacatttcaggcgagagctgaaattgaagatggtgcctgaaggaaccatgctgcctgaggaagtctgtcttatttaaggatcacagggaagacttgtttgttggactggggagaacaggggagatggatacacacagaaagttggagaagtctggggtcaattagctcatgtagtgagaaatttgtggtaagactttgttgctgttatttgctattttggggctaagagattactgtataacccaggttggcctcaggtctgtggtaatcctgcttcagcttccttatgcctaaaattagaagctgaatcagtacaacggcctcataaaatgatttaagctagagaatgacatggtttatttctacctttttactattgtgaataatgatgctgtaacatttatgtaccatttgtatctgtttgtgtgtcttgtgaggccatattttcatttcttttagggctatctttggaggtcatagtgtgtcttagtttcatttctgttgctgtgatacacactgcccaaaagcaacttagggaggaaaggtttatttggcttacaattccaggttatagtctgttattgagagtaagtcaaggcaaaaattaaagagcagctagtctcatcatgtcttcacttaagagcagagagaaatgaatgaaccaagctgtctatttgccactatgtaggctcaacaacttcttcacttttacagagttcaggaaccagcctaaggaatggtacttcgcacagtaagactggctggacccccatcatttagcagttaaaacaaacccacatagacatgttcataggctagcctgatctaggcagtttctcaactgagttctctgttcaagttgtgggtagttgacagaactaacctatagtgggaaattaccaatacggagtcagatagaaatataagggtatttaatagggaaaagccttacttacagagcgacctagccagccggcgtggtagcagtctgtacagcaagtaccaaagtgaaactgaaagagcaaacgcaatcacaccacgtcactctgaccacgccctcacaagcgtggtcaggcacacctgaggccagtccctaagtaggagtggctacagcttcccctacactaaccattatgtagacttactccaatttgtccatcaaaagtgactgtaccattttgcattccactcaggaatgtttgagtactagtttctctacattttgccaatatattatgtcctgttgtgtgaacagaaaatagacacataatttgcagtagtctaaggatggggtgttgaattaagactaagagcatctcactgcagtaacatgtccagataatatggaagtagatctacaggactttagagtgatgaggtgagattggtattccagctagtttatatccacttgacacaggctggcatcattgtaaagagaaaatgtccctaccagattggcttgtgcacaaacctgtgacacatcttcttgagtgatgataaatatgagaggtcctaactcattgtgggtggtgccattcctgggcaagtggctctgggttgtaaaggaagcaggttgagcaagccatgaggagcacccctccatgacttctgcatcagcttctgcctccagtttcttgctttgaattcctatcctgatttccctcagtgatagaatgtgacctgaaaattgtaaaatgagatgaactttttccaacccaagttgcttctagccatggtgttttataacagcaatagaaaccctaactggtagaacagcttgtagaacagaagtagagaaaagatagttttggttttcagaaatcacttgggacttggaattgtgttttgacactactcatagttctagatgagttttacatgaagtcaatgtcatgatatctttcactgacagctaagctttaagatgcctgtgaaaatgtcatataactgattacactacagagctgtaaaccggtgaaaatgtaaagttaggggttaacatagcttcaggttacaagaggatattgagggtttgccaaaacaaagtagaaaatgaatgctcttgagttcagtttggatagaaaggggaagtgagacaggcaagggagagcagtggattagaagaatggaagggttgagggactggtgtctgtatggggctgaagactatatgaaaagcaagtaagaaagcaagattgctggaaataaaaaccgtgtggtgagaaattgagttcctggggttaaagataatagaggcagagttgttctagaaccgataaggctcacattgatgaagtgggaatgtagatgaggaggagtatatcctgatggacaataaaattgccacacagatagcagctttggaatggaaaaaaaataggaaagggccaggtgaccaggaaaagccctttgtgtatgaggcatggttagttaacaagaagggattgcaacaagttgtataaaaggccatttacttcagaagtcttttacatgtgaagatagaaaagtacattactataggaaaatgagaaatgagctagaaaaatgctgagtttctttggcctttattagatgtggaaaaatttaaaaaaagaaaaaagctgccttcattcaaggggctcggggaagaaaattcctgggagatatcaactgaggtagaggttgtgagaattctgctgcagatgccaggggtgtgttctctgtggagtaaagattccagcataaatgttgagaattattgatggatatcctagacagaaagtgggtggaagaaactgagtaatatggtaacagacattcataactaagagatgactagaatcagaagcccagcatagcaagaggaacaaggacatggggtggactgatgaagtgatgaagtaatgaagtatgtgcttaggaaacctgaggaccaatttgttattgattgataaatgatgttagcagactgtacaatgccctgagatctagtgtattgccagttacaaggttcttattgtctggcagcttataattcacaggtgaggtggccatgtagctgaggctctccagtgttatgaagaaagtggttaagtgaagttaaagactgtggaaacataagatggagagtttagtatagctggaaggcctggggacttcttggaaaagtctaggttttccctgagtctgataggaaaagtagcatgttaataaatgggctgagctaaagaaatagtctgtgtgggatggcatgatgtttgggcttgtggaacaattggtaaaacaagtcttgacatgaagatgagtaatggagaaaatgggaggggaagaaaagtgggaattagatgtgttgtattaatagccgtggtgaccagagcatgcacatactaatatgtgagaaggaaaaggaggagggtggggtgtcctgaaacagagttgtgcttctttgctgtggtacctcaatctgaggaagcccccttccctgcccgttcacccccagcagcacttgatgtggacagcagcttttggcaatcctgccaatgtgtgtttctgatgtcatcacagggagagtgttgtgccacatccacaccctgtaccctccactttcatcttgtctgaaaagagaacttaaaggctggccagctggttcttgcttgaaaacccagattttaaaatctgagattacaaacttgatttctcttacttattttttcactttgcttctaacagttatttggttccttgatgccacattgctctatcaatatttttataaataatgtaactaagtagaaacataatttggagttgtattgcttttaaaagttatccttattctcacagaaggttgtgaagtagtcctatatgtattttaaacttacccaaatggaatttagggttgctgtattagagttttgtttagttgtacaaaacagaaaatcctattgcagtgatttttggaaattgatgttcatttattctatgtgacatgaattctagggttatgggatggctgcagctgcccagcagttttgtgaggtcctaaagacccacctggtggactttttgtaacccccccatccccgtttacagaatgactgcaagagaaagggaagacaataaggcctgtcttgcatatatgccatactccgttttagtaaaaagaggtctccaattgctattagcagacttcgaatctgatttcagtgactagaattgtctcttctggtctttgtagccacaagggaactaaagtgactcttgtcttctcaggcccagcacaggatgctatgggagaggaaaggaactcttccatggagtggtgaaaatgaacatggattacaccatggtcttaagttttatttcaactgctaaggcaaacagtgttaatcaaaagctagatgcaatgattttgtattttgttcatttatttgctacttgttattgttaataaacaggcttaagatggacttgtttattttaaagctaaaataataaatattgtcacaggtcctaagataggaagcatttcaagaaaaaataatgaaacaaatttagactttttatgtaaagggttagggttttaatatatttgagaatgagaccttaaaaaatacatgtttgtacatggtggtttatacctgtaatcccagcacttggaaggctgaaggcaggaggattacaagttgggtgttcagcctgagctaatttaaaagtaagtgtgtgtgtttgtgtgtgtgtgtgtgtgtgtgtgtgtgtgtgtgtgtgtgtgtgtgtatgtgtatgctcatgtgtacgtatatactaacatacatatctgtatacatattttaaatctgcattttaagctttaatatagtgtcttttcattgttaacttatttgaatatttttaatttaatattttatatgatttagattttttagaaataaattaagaatgcattttttatccttgagggacttaaaatgtgtggggactgagttacattatttgacatcagtaaacaataaaaagtgtaatgtgatcaagtatcaaaagttgaattcaagaagaatggtaactgttgactgtgattacttccataacagtccatgacaggctatgtgagagtatggagtcaaatgtgttaggaggccccaaggagcaaaggcgggtctgtctgcaccacccagcctcgttgaactacatgcagattcttggatgttctctgtgttttcatgttgccatacctttagcattttttttatccatgaaaatttattgcgtaacttcttttaaatgattagttttttaaattttatattactgtttcattcatgtaagatagtattatatgatacattgtatggtacaggtccctcagaaattctaaggctctcctatacttctttgaggaagtaaagactcctcagacagcatgtgaatacatttttaaaagaatattaatggaacagaattttaatagcactgcactaaccagcttcaaaacctgggcggactctgaattgaatgctggcctttatcaggagattatcattgatgctttgtggctgttcagcatgcgcacaaaccagcacctgacacaaccattggtattcactgtgttagtgtgtttactgaaccatgaggtttatgtcaatggcagcagaacttttctgtaaaaactatgtgcaccccccaatcaagcaatattttgtccaaaacttactcactaatgtagaatattaaccaatccattagtgagccactaaaagaaaaaaaatcacaaaaagtaatcattaagttttaattattttgttaacataaagggtttggaatgccagttaaacatcatgactctgtgtactatggtcagacagtgtttacagcacttttttattggcctggcagtttactctttcaggactcagctcaaatgcaaatgttcctaggccatggtcggtggcgggtgcagtttgcagcaggaagactaggttccccaccagcctggtaagggcaattgagaacttgcacctaaaatatagtatttttagaaagggctagaatatagctcagtggaaccacagcctggcatgcacaagatctgattcatgtgccatcatgtgccgttgcctaagttctccctgaattttcaggtgtgtgtgtgggggggggggtttaccacatggcccatttattcacttgcaaggttatgtcacaagctcatgaaccacatgcacatggggactatgccaaatttacctttgagtcactgtgcctgatgtgtagtggttttgtatattggaaagttcttgtaaacctttttacacttattgattttgggtgtatatgtgtttatttgggtgctcatgcaatgacgtgtgtggatattgaaggacaacttaggggaattgggatggagctcatatcatcaggctttggggagctcatatcatcaggctttggggcaagcacctttacttgttgagccatctcaccagtccccctccgtgagtgttctttagatgaataagtaagtaactgagtggatggatgaatggataaagggaacatatcatcaggctttggtatatgtgtttatttgggtgctcatgcaatgacgtgtgtggatattgaagaactcatatcatcaggctttgaggagctcatatcatcaggctttggggagttcatatcatcaggctttggggagctcatatcatcaggctttggggagctcatatcatcaggctttgaggcaagcacctttacttgttgagccatctcaccagtccccctccgtgagtgttctttagatgaataagtaagtaactgagtggatggatgaatggataaagggaaggaattcatccaaatcatgaatattgggaaagtctattcagacttgagattcaagcatacttaactattaaagaacagggtctgaaaatttcctgtctttagaaaccattgaagaggtcacccaggacttgctgacaatgcaagttgcagtaaatattggagttacaaaccaaacatctaaaattggtcaacatagctccattttccaaaacatactgtgttttcatattttctagtgcttccacttctcattcagagaactcggtgcatacgaaatcagtttctgccatatcttcagattccatttcaacttcggcagacaacttttctcctgatttgagggtatgtatgctgcgtgaacatactgaggatggccatactgttcagtgtctgaccagcactgtcagcaaaacctttaataattaagtaggtcgtggcagagagttctcaaagaccgcagactttataaattctcccagaccaggccagcaagtttgaatgcttgcttacgattttattttatttttttattttttatttatttatttatttatttttggttttccgagacaggatttctctgtgtagcttttttttttggagtctatcctggcactcactctggagaccaggctggcctcgaactcacagagatccacctgcctctgcctcccgagtgctgggattaaaggcgtgcgccgccaacgtctggctacttaccattttaaaaaatgtacatttcattccttaagttagtactttaaaatattttgtctaatttattttgtggtacttttttcccaatagcttccatattaccaggcagtaataactaacatgcattgagaacttaccataagccagttaactgttgctctaagtaaattatctcttgtaatacttgagatgttttgttatttccatgtagtatcttagattaatatgtccagagattcagagctaatgtcatggctaatcagtttagttatgtttagccagttgtattagtcagggttctctgaagaaacagaactgatagaatttattggagtgtcattcaggctgtgatctgagtagtccaatgaagggtgtctcctgatgcaaaggccaagaccctaatagttgttcattccacaagactgagtgtctccgcagtcccaatctggtactggagtcccagagaattcgtagagagctgccagtcttcagtctatgttacatcagtgaaagaaagcctcagcaagagtaaatgaacttcccagcaagagtgagggcaagcaggcaaaaacaaaagcttccttcttccatgttcttttatgtggactgccactgtggtgtggctcagatataaggtgggtcttcccacttccaataatctaatccaaaaacaaagaaaacaaaaaaacaaaacaaaaaaccctcacaggagtgcccagctgcttgggctttagttgattacagatgcagtcaagttgacaaccaaagctaacctccacaccaccgttctatcttgttgagtccaattctgtagttactaagcaccaggtgatggatcattcttacacatctcagtacattgtaaaatatccctgtatttttgccttatttctacagaattaaccacacatcaatgatagcatatttgtggattcatctgcttttcttcaaccacttgcctgcctctgcctcccttgagtgctgggattaaaggcgtgcaccaccaacgccctgccagagtttctttttaaacagtagacattcattttcatggttctagaagatgggaagtctaggttcaatgctacagaccagtgtctgcaagcatattctatctggtgttctgtattatatgggacgatctaagagaagtttactccagattgtaattcagaatgcctctctctggcagcagggaggaacagtttctatgagctgaaccctgaatagctgtacaaaggcttaattatttttacacaaaagtcgatttttttttcttgtaggaataaatactgatctactaccagaggccccatagattgccaaggcctcctaactgacacccatgttctgggggtctggatcaggtattcacaggtagaccagtggcatagaattgaaaaccctgatatcaacccacacacctatgaacacctgaaatttgacaaagaaattaaaattatacaatgtaattgagaaagtattttcaacaaatggtgctggcataactggatgctggcatatagaagactacagatagatccatatctatcaccatgcacaaaactgaactgcaaaaggataaaagacctcaacataaatccagccaagctgaacctcttagaagaaaaagtgggaagtacccttgaatgaattggttcaggagaccaattcctgaacataacacaagttgcacagacactgagattgacaattaataaatgggacctcctgaaactgagaagcttctgtaaggcaaaggacatagtcaacaagacaaaatggcagcccacagaatgggaaaagatattcaccaaccccacatctgacagggggctgatctccaaaatttacaaacaactcaagattattttcttaaaaaactaggtaacaggatatttagaagtacctaagaaataatcatagaaaatcctgaattggaatttttcatgtaagcatcaaagtacctgtttctaaaatactgtaaatgaaacaaaattgtgaaccatctcaaagcataacagtttatggaggaagaatttgttagacggctttggctttcactacattttatagacagtttgatataacagagtctcaagctggaccaaaaataattttaggtgactactgtaaagtaatccattttttattgatcgtaattttgatttaactccttttggccgttatgaaaatgtaagaaacatgtaattatatttttggacattgcattatgtagaagaaatatttttaaactttatttgattttagtttacttttatctctttttaaaattcattccaagcctgtttcattgctatttttttaattttttatgttatacaaaactataaattaaaaaatttgaccaatatacctgattttaaccaaaacccacttttacctgttaggcttaaccttgaaaacacatataggctaaagcttgttcttgtgaatgaattaaatttgaacttagcgtaactataaacctggccctgagcacatttaaaaaagtgatcatttaaagtggtttaccattaacttgtatgtcttaaccatcttttaatagtttataacaagttagcagcttttaaaagtttcaaattttacagctttactagacatacatctctaagttaacttctgtcaaccctttataatcttaagaatttatcatcacacaaaattcattctaatctaaaatattttgggtctaagaaaatttttaggtgttgccttttactaataacagctacagctattcttgactttcctcttaggcagggttttgggtattttgttttgttttgttgttttggttagtgttcttttttgtttttgtttttgttttatgagacagggtttctctgtggctttggagcctatcctagaactagctcttgtagaccgggctggtctcgaactcatacaaatccacctgcctctgcttcctgaattctggtattaaaggcttgcaccaccacggcccggcttggttagtgtttaaagcaaggaaactaagttaaaggagcacattaagtgttttttaaaatttttgtctctctttttttatttctatctccaaactgctcatgttatgcattctttcagatctaaccaacaacataccaagaagccactgtcactagcacagcacatagacagtgaagataacccttagaactgggggaatgcctttaatcttgtgtttcatggagtcttacaaaaaataatgacaagtattttagaacctttatagatatccctaaactgtcttcatgtgtttgtttaaatgaaaaataacattctcaataaacattcaacagcaaagaacctcattactgaagctatttgtattttccactatatgcgaatacaagacaagccaggaagagtaaaatgagtaaaatcagtgtttgtgtggtaaattttagagtgactgttttctataagactatcagtaagagactatttctatcagctaccactgttgtagccacgttatctgaatagctggtaacctattctgttttaggtggtatatttttgtagaatttaatggagggttcccagagagtaacttaaggaaacaggccaaatcctcaggagtgataaacagataagagtataaccaacaatatagttcaaaattgtaaattttgttttttttttaatttaccatgaaaaattaatcattcattagataatcaggaaaagagaacgtcctcaatatagtcaattactaatacctctggaaatttaaatagcattggcttagtgatttatgcccagattgcaattgtttttatatcaaaagttgggctttttaaatgtttttcccataaggggattattgatagttattccctttattagggaaaaacaaaaaccatttcccatgaagggacatttaaatattgacttactcccaatatgaggggggagaaacatttaaacaaaaaaacagccgggcattggtggcgcacgcctttaatcccagcattcaggaggcagaggcaggcagatctctgtgagttcaaggccagcctggtccccagagcaagtgccaggataggctccaaagctacacagagaaaccctgtctcgaaaaaccataaaaaaaaaaaaaaaaccaaatgaaacaaacaaacattaacaaaattctcagttgggggttggctgcattagctgcagcagtgaggccccacccatcatccttggaaattcaggtgttgccactgttctgcattggcatgcccttagctgaaagagctgacaggcagcaagaagccagagagcggagttctagctgctagtaatttttcaatcttttggaaaaattctattcaccaataagcgaggataaaaagcttactttatttttatgatattttaggatttattgtgaaaatacgccatttttcatatgaatgtaagattttgtaattcttaggcactcaggaaatacttgtagaaaatggcagcttcatagtgtatgtagcaatactacagtttatataatttgatttaaagtagtataataagattgcaattcaaataaatgcagatcatctggatgaaatttgaatggaaaaaaaatagccttcgattaaaacaatgtttctttcttacactcccccatctaggtcctgagggagtcaaacaaattagcagaaatggaggaaccaactctgcttccaggagaaaacattaaagacatgggtctgtaatggtattttaaaatttgtttctttctgactatgcacagttgttcattctcctgtagctcccagcctgtgtgctgtaaacctagatccagagctgttgggtgtgtcctgtctcactgttgggaatttgaattactgcatttagatactgggttgctgagctagacacattggacatgtgatttttttttttaaattaaagtacagtctgtcatttgctccttttttttataattttcttccttagataaactcgggtaagttttggatgaagtctttcatgtgcattacagaacaagcactgtgtgtagacacggtctgctgcccagtacagtcctcatcatttgcgttgtgcactgagactgagcaggaaagctgtactgtgtgctcttgttctgttattcttgctcacaaaacaaatattcaaagattttgaagagcactgttaggaggatgaagaacatattttctttgctaaagtaaacaccatctttcatatttcagtcagttatcccccattaaaggaaatgcttcacttatagtgtaaaataggcatgccaaagcaaggacctatcctcagatgggctgatagtaactgccaacttagtttcttttccttccttccttctttccttccttccttccttccttccttccttcctttctttctttctttctttcattcattctttttttgtataaattttatttaaaataatcttcttttacatatcaatcccatttccctctccttaccatgctccccaccaaccccccccccatcctatctcctatccactccccagggtgggtaaggccttccatgagggatcatcaaagtctgtcaagtcatttgtgggagggcctagggcctcccccatgtatctaagctgagagagtatccctccatggggaatgtgctccctgaagtccattcgtacactagggataaataccgtttccactttcagaagccacatagatccatcatttagcatttaataaagcattgactatgtctaaaattcgatgtcagaaacttggtcagggtatactatgctctttttaaaatatcttattccaaagaggtccagagatggcttggtggttaggagcacttgctgccctagcagaagactgggatttgattgccagaaccgtctgggtatcaggctctctctctctctctctctctctctctctctcnnnnnnnnnnacacacacacacacacacacacacacacacacacacacacacacacacacacacacgcaagtaaaacactggtaacacatacagaaaaaacattcattcaaagaaatgttattctgtctgcagtcttttaatgtctcagacatatagtcagctcaatactttctgatattgtatatattatggtcattttatttttaaagaaatagtgcaaaacagcaggtgaaagaggcctataaactgggaaatgagtgctggctctgtgttcatatgttgatcatctccctgccactccaacctctgacctgcttcactcagtagggacagcaggcaatctttgctccctcttcctatttctggagaggctccctttgcctttctgtttattttacaattcttagtgtaagacaaaattggaagcatggattaggctgctgaaggttttttatttaaatcattctgtggtttattttgtcacaattagataagcagtcaaattaatcttataaaatgtgtaagctgtttttaatagctattttgtcttttcagccaaagatgtgacttacatatgccccttcactggtgctgtacgaggaacactaactgtcacaaactacagattatatttcaagagcatggaacgggtgaggcttatgagtttggcttttgcctgtacatttgcttggtgtttggatgggtttgctcacttctgatttagtttttattattgagacaaagtcttatctgtgtaaccatggctgtactggaacatggtatgtagatctcaaagatctgcctgcctcagcctacaagtgctggggctaaaagtatgccctaccatacccaattaattctgggtaatttttgattcaagaatttctggttaagattttaccagtttggggggatgagtgttggagattgattgaacccagcgtcctgtcctgttggtgttattaaagcacttaacagttttttagaagttgtgtgttttcttttcatcttgcaggaccccccatttgttctagatgcttctcttggagtgataagtagagtagaaaaaattggtggtgcatctagccgtggtgaaaactcttatggcctggagaccgtgtgcaaggtaaattttacaacactgtgtggttgtatttactttggaaagctattaagtagaacctatacttggaaactggtacaagtcagtggactgcatactagaaatgtattctcatagaagcaaatgttttttgctattcacacattggtttgggctgagccagctgttaagacttcctgaagtggaagaacttcaggcagtttggtcctgtctgtctagcagaagagacataacaaagtgagctcctggaagcagtaataaatcagaaaatgatctctatatgcaagtgaaatgtagtaacagctgatcgtgttttttatttttaaaactcaagttctggtaattaaactaaggttcttgtgcttgtgaggcaagcattttgcctactgaaccatctctcctgcctaggaaaggacaaatgttgatagtgtgtattcgtcagttatttacatccccttgggccctactaagcctagacacacaggtctagattctgtgccatgtagtggagtactttgtgtttcttctgctcacagagaatcattgctactttgtgtcctggaacaattgttttgtatcctatatgtagagctttacctttactcaacatttccaagtaatttcatttcttcactaaaaaggaacaaagtgatttaactggatactgtatcttttctaggatatcaggaatttacgatttgctcataaaccagaggggcgaacaagaagatccatatttgagaatctaatgaaatatgcatttcctgtgtctaatggcttggtaaagtttctctctaacctgtaatgtaattattagtgtgatcaaactcaactaggttgtccagatcctcccctttgtgttcctgctttggcacttagccagaggctagcttgtgcccaaagtcaatttcagtaatgacattctataattatgttgactttggaggagggggaaaaattggagattgaactcagggcttcacacatgctagggaagtgctataccacagagtggttttgtttatttatgtgtctttatttgagacagggtcttttgaagttgtgtgggctggctactcctgcctcaggttcaggaggtctggactacagcctgtctctcatcttggctgtcttagttggtgtctatccctgtgaaactttgtagaccaggctggcctcgaactcaaagagatctggctacctctgtgccttccaagtgcacctacaattaagtagagtagaaaattccacctacaattaaaggtgtaaaggtgtgcgccaccaccgtcctactgaccacagcaactctttataaaggaaaacattgcattgtggtggcttaagttcagagatttagtccattatcattgtggtaggaagcaaggcagcatgcatataaacaatgtgctagagaagcagctgagtgctcttatatcttgactaccaggcaacaggaagtggtctgtgtcacagggtgtgacttgagcatatatgagacctcaaagccggcctccacatatcctgtaacaagaccacgcctactccaatgaagctacacctcctaatagtgctactcccattagaagccattttctttcaaactaccatatcagcttatataatatttttctttaggatgtttccatgattaaaagctttatgtagtcttcattagggtttgcaatcttcctggataggaactggcattaagactggaaatatgggtcagttattagttcagcagtattgtgacagtgataggttccctcatctgtatgatagaatttcacctaatgtcagccaacttcattcccatatgaaaatcaggatggataaggcagataatctattaacttaatactgggtttctcacttcagttgcaatttttttcttaaatactacagacttttctagtcgaatttaaaaaaaaagcttttatacactaaagtataaaaaggtcccttagtgtattagaacatacaatattacagagccactcagctgctgctgctctgtgttggaccagttatttctgttggaaagtgcatttttggagatgtcatttattacttagaattaaacctacaaaaactgccaaaatattttaaagtaataggttagcatttggaaaattttatgagtgggtctttgagcttttctgtacttcttaaaatatataaaatacttagtattgtaaattaaacagtaatttcagtcataaaactaaaaccattttaaaggaggaatttaaaatactcttgcagataagctaattaaaacataagtaattataaccctttaaggacatatttctgattgattgctttcttaaatgtctttttttaacttgtttattttgtagcctctgtttgcttttgagtataaagaagtattccctgaaaatgggtggaaattgtatgacccccttctagagtatcgaaggcaggtatgtgcttttctgttctagctttcatgctctgtattattttcattacagacagatcagagtcaggagttctttcagtgtctcttcctttttggtttaagtgaaggctaaccctggttcgcttggcttttcctttgaattgctttccagaatacactagtgatctacaaatctttgcttatctaggagtttgtctgaaaaatgtttgctctgtaaagatgtaaacagaatgagtatgtgtaaaatttaatgttcttatatgccttaatattattcactcagttttttcttattaggcatcctataatttaattatgaaaaaaataactattgattctaatttagctctgcaaaattttgggttttactcttcacagaggatagagtaacactttcccttgtgctaagggcagcattgacttaatttggtcagtacccatttattttaacgtacgcgcgcgcgcgtgcgcgagagcacgtgtgtgtggtgtgtgtgtgtgtgtgtgtgtgtgtgtgtggtcagaacccatagattttactgtcagcgtgcatgaatgtgtgtatgcacacatgtatgttgtgcctgtttgtatttgcttgcatgttttccatgcactagggattgaattcatggcctcatacatgtgagacaaatactctactactgagctatatctccatttttcatgtagatcaaagtttaattcctattaatagcttctcaaatattttccactcaactttgattcatttaagcttgaagagtatttattaatgccatgtgtgtcctttctgcttttctctactggagtcaggtgtttggtatttgttattgcttatgctccagtagagagggtactggccagttttctcactgctgtgttatcaggatgtagcagtgcctgacatgtcatagacaagtgtttgttgaatgattgaatgcatgaggctaagggaagagtttgcttacagtgtgtgctatctatgttaactaacaaatttttgcatactggtttatttaccctgtggtacttaagcacatgatgtaaaggtactaaatattatctgcatagcaagagtaaactgaggcatagggtcattaagtaatctgtccatggtaacatagctattaatgtggaagttgggaattgaatttgcaaaattatatttcagtaggtaagttagtattagtcagataccaacctgtagagctaatagatgagttaatctggaagatgactgtaaagaagttcatacatagacatggagtactacagtagagcatcagacccacaaagtcttaaaagtggctagaagaaataattctgttgggctggtgagatggcattaagcacacaagcctggagacttgagtttaatcccccaaatgcaaatcaagcacacagctgttctctggccttgacaggtgggctgcagtacccgcctttacccttctttatgtccattccctaccaataataataaattatttctttttattactgtcttttaaagaaaaaatttggctagcagtgtctgaggctatggaaatacacagcatatggcaattgataattcaggtgtcaacccaccagattctgatggagaaaatcttgtttatcaaggcttacagggggaccactgactctgaaaatgggttgtctatatctgtaatttttctcatgtgcacttaatttctttcctaagaatagctttggatgttttcccactgctcgtgtgtttgtcttgtaagaatattctatctattgtgggtggtcaggaggatgacttttcatttagctatataattttgatatatagaaaatatactaggacatgcttcctaactagatatatttgtctaacaaggactatagacacttaaaagcctgctttgttcatttttctctgactaactacacacagttagcttactttcatctcagagcaagttcaaaacaactaggctaaaagctttttgtcaatagatcataagtttaaaactttatagctatgcacaaggtcagagtcgaagatgtctgacccggttgctgcgcagagcaccttaggaagggcatgaaggttctttgcttgccaatctgttaacaatggacctgtgtctcagggtttgtcactgagcactgtgctccccaccccccactcccaatctggtcatggtcttggtcctgtgaccttgggaccttgtgtttccatgcaatggctcagctccttattgcttactctaggaatgtgtttttgaccaatgaaaggtaactcttggaagtttttttttaatcgtttcaaggctcctgtaaggagaagagtttttagaatagaagaggaagctggaggaagaagctaggaggaattgcaaatagacaggagaattagaaacagaagaatagagagactgattcagaaaagcacataatgaaagaattctttcaccctcagatatcctaagtcctccaattgctgttacatccatcctgaaccctgagaagagggtcttggggctgggcaccaaaggctctcattatggcaaattgtttttcaaaagtgaaagtggaggctagaggatagtgtgacctgattgtacaatgaaatttgctggcttaattctttatcagtaattatatcttgtagaaatggaagggaaataaaatcatctcctgacagagtactaatgaccagagaaggttctagagaatgtatactatgtatataccacagcaaatcagttaccttattactacctgatggctcttttgagaataggacactgctgtctttctgttccctttccctcccccatctaggttcacaccctctgatagaatttaatgaactaataggctactaaacattacatctgatgcccccccctgaaaaaatgcagatcctcccattaaaatatgtgtcttcctaaaagtctggccacatcaccatttgagcagttttaagatatgagaactggagataggtgagtggcttactgtcctggtgtctattttagctgacagtttgtctcttgttttatgtcatgtgtagaaatgaacgctatgaactttgtgacacatatcctgccctcttggttgtgccagcaaacattcctgatgaggagctaaaaagagtagcatctttcaggtcacggggccggatcccggtaagtaggctgagtgccttgagactctgtaggtacatttcagtacaggatgataatggccatagcatttatatgaggatatcagagactaaattaaactgtaaagttgaaacagagttgcctagttcctaactcaacatttgccctgtgtgttggttattctttatcttatatattctttagtcatggcaataaatgcttttttcttactgagtcaaagagtagaagactacaaattgatgatgtatgtatgactgtgtctcaaaagagcagatgaaataattttagaggcagaagcgtagaatccgagtcctttatagttttactgatatagtaataaaaaaaaacaagtggagtttgtttagctgttttattgtactttttctaagaaaagatttttcaataataagttttacaacagtatctaatttggaagtaggcaattctctacaaaacagttgactagaaagtatggtggcatattttcctggcatccagggccctcggcctgttctgccagaagtctgctctctaggagacttacaagcaggatagcaatatcaccatgttcctgtcattaaggttttatcatggattcatcctgaaagtcaagccacagtcactcgctgcagtcagcccatggtgggagtgagtgggaaacgcagcaaagaggatgagaagtaccttcaggccatcatggactccaatgcccagtctcacaaaatatttatatttgatgctcggccaagtgtcaatgctgttgccaataaggtgagggttgttttgttttttatttttagtaattatttgtcactctggtgttgctaaagccagctagatttgtctgtgctgttgcctggtaaaaagtggtcagaccctatggaggcagagagaggtcagactacactgaggaaatgatgatgatgatttccaagactgcatttcatttgtattatagaaaaattagttcatgcatttagctaagtagatgaagaaaatgttttaaaatgccccaaaacttggaacatcattaagttttgcttgtatttccaggcatatgtagttttctgtaaatatttgaagtgaaatggaataatttttgtaagttaacacattttatgtcactgaaaacttataatggtttcttaatgtctgataataatcacagtaaacattagactttttttgtcctcccattgtgagaggtgcttgagtgaccatccttaactcatggaggatatttctcattctgcatctgcatagtttgtttaaggccattgtgaactccaggtgtcctttgcaaatggcccttttaaaggaggtgagggaggaccatgatatcttaagtcattgcagtggtaaagcatagttgttggtttggttttttgttgttgttgttttttatcatttcttttttgtcagttaaactgatacccttcattggggtaaaaactacaaccaagttcattataaaagattttgtaatgcagaattgtttcattcaattagtattaaataatttgaatgctcaaaattacaggcagttttcaaaagcagactcacatcattgtgaacatcaaacaggcaccatccacagacatgttttatcataattttacattatactgtttaacacactgctcatcaccaatagtctttcttctttatgttattcttcttgatattttactgagtgtgatgcataaataaagcctgtaaccaggaagtcagatgttttctccaccaagtgctgattttcctccctaaattctgaccatgaataaaagtaaaaatcagacttagtcatctgtgagaaggaaaggcagcaactgtggtagggcaaagtgttgatgtcgtcaactctccctcctctacacctcattctggaaatctgcagcaagtataggaggagcagttttcacaccttgatgaattactgttgtaactgctcctgtggccaggatcccactgagccacctgtaccctaagggcagtcactttcttgctctgcactcctcacacatctttatgtatttcacaggtgtttacctctgcactctgcatgtcagctcatcttccagaatattttgttcagtgtcttaggattttgatctgtggtctccttttgcctatccagcttttcctttcatgtcacctgactctgtcacagtgtgggctgtttttattttgttcccaaatctctgaggtgaacgtgaggtttattcagatttaggttccatttgttctgtgggccactgctgactgttgaatctgttactttgattcacttgagctaaaatagtactttttaaaggtactgattgaattctttttgtaaagtgatgcttctcttacctttgattaatcaggataaatgcttcttaattctcagacatgagaggggctgcacaggtaggaatttatagagattagatagtgttggttgttttacacctactttaggccttagcacttggctatcaggatggaagggcccctcttagcttagggtgcatagcctctcactgtggagacaaggctagactgaaacgtgaagagatctgcctgcctctgcctggtgagttctgggtggggctaaaggttgagcctctgtggtaaggttactatacttctaagattaaagaagaaatgtgactttgtggacattcttctgactaaggtcatctgtgaccattgcagtctggtgccttccattcactgatggcagtcaacctttgggactattggtagtctgccctgtgcttgcctatacttggtagtttgagactcagtagagtagttaattaccaagtttagttttaaatgcttttcatcttttgctttactatctagttgctgtttaaaaaaaaaatacttaacggagatataactcagtgtactataagaaagtatccgttcctttagtgtattcacagcccatcgtagctatgagttctgtattatttccatcctcgttctgtagtgggtttctagagtaggtactgccatgctgtgggttgtagtatttcttcctgtttctgtgatgggctattgtagtagctactattaccatctcctgaaattcgttgcaacgaaattgctttgaaaatttctctatcctcaatcttacagttactttgttagttactttttatatcctggggcagaacagctgacaggactgctgtgagcatgtgccagttactcgctgaggcatgctgggagaaacctacgtcttctagctaggcctcacattgtaaacatctcccaacaatctccctaatagtactagcaactagggaccaagtatacaatataagcccatgggtgacatatgttcaaactataacacccattttcactcttcagaagtcatctttgttaacaagtattaccaacatttacttttgtaataatgttgaatacaaattactccatggactagaaatccgacaattttttaaattagtttggagttgaattcagaggtatcatagtcacgatcctattagtggagttgctctactgtactcccaatttgctttttgataaggcttcaagaagtgtgattttatgtatgagttaggcaagacagaagatttttttatgtactatatgtgaaacattctgatactgtcaacagatatgaagacatcaaaaatatagcttcccccatgggagtaggagctatgtaggttttgtataggcctatccctcaactaatcttcaccacatggcagagattatcttcatcctttttccagagcagtacctgtcatctcaagagcttctgaggatgtcctggcattttctaaatgtaaatccatcttcattgctttacggtttgacagaagatttttttaaacataaaatctaatattaaacttgggaaaattatgttctatttttcagctatagcttgtttggaaaagcatgcattttcttattttatagatttgaggatagtaaatgtcagtgggattctctgtttgtatgttaaatttaaaatgaatcagctgcttataatataagcaaactgaaagttaatcttgtcagtttgattgaaaagaggactattgtttctgtgagggcattttgagagataaaagctctgacctgcccaatgggttaatccatttttttatttacattttagattttgcaaagtttagtatatagcaggtagagcttagctgggagaaggggactacttggggtatacctttgagcggtggccttctgcccttcttgctactcttccctgtagcctggctgatatgtgtgaatgattttcctttgccatgttctttctccatgatgaacacactccagaaatgtggggcctacctgtggactgaaacctgtggaactgactgtgaagtaaatctccccaggaaatccttcctcaagtattggttcacagcaacagaactctaacttggagatcattatggctacaatgaatttgtttttctattattaactgaaatgatatgaaaaggaaaataagcttgggtggtctagaatgggactcttgcatgcagaaatgataatttgattatttcagtatgtttgaagggaagtctacataagaagttatagataggatttgatacacacaggaaaagttttctttacaatgctgaagtgctttgaaatgattcagaataaacaaactgatcacataggcttagcacagactccattttagaaatggtatgagtgtgtgtttattacaagtgaccctgagctactcctgctatccttatcctcagcaatgtccatcctattttagatagtttatggaactttgtaatggatgtcttcaaaagatggctactcattcatttatgattttctgtgatttgtgcccttttgcaggcaaaagggggaggttatgaaagtgaagatgcctatcaaaatgcagaacttgtttttttggatattcacaatattcatgttatgagagaatcattacgaaagcttaaggagattgtgtaccccaacattgaggaaactcactggttgtctaatttggaatctacacactggctgggacacattcaagtgtgtatttgctactccttctcaaagcctccactcctttgcttgccttggctcttgtaactgaaatcagcannnnnnnnnnnnnnnnntggagccagtggctctgtgcacactcgggtctgaaggagctgcatcctatgctgtgcatgggtttctgctgcctcttgttttcctcttccatctgaattctgtccatactcaagagacagtgtctttcacttctgacagtcttcgcacattgtatccatttccagtctcttaggttctcaacccctactcaacttatatgccattcttcatttatttgactgtttttgaaacaagttctcactctgaagtccaagcagccctccacctgtgactcctgggattataggcatgacccttggcatctgcatcctttttattgttgattgatgcttcttgccatgtgactgaggtagtttttttttttttggggggggggttcgagacagagtttctcgtgtagctttggagcctatcctggctctggctctgtagaccaggctggcctctgcctcctgagtgctgggattaaaggcatgtgccacctacacctggctgaggcagttctatgtaacagaactatattagtttcttttaagacgtgtttaacattttttattagactttcattttacaccttgtttccagctcattcttgcaggggctcttaggattgctgacaaggtagaatcagggaagacatctgtagtggtacactgcagtgatggctgggatcgcacagctcagctcacttccctggccatgctcatgctagacggatactatcgaacaattcgaggatttgaagtcctcgtggagaaagagtggctaagctttggacatcgattccaactagtaagtaaagaaccttcattttatcatgtgctcatgtgggcatgtacatttgtgtgcaggctaggggttgttggttttcttcctcagttactatctaccttactatttagagacacacggtccttcactgaacccagagttcacagctagccagcaaaactaagagatctgccatttctgcctgtccatgctaggactataggtatgcatattatgcctaacttttacttaggtgttgggaccaaactcagatcttggtgtttttgtggtaaatactcagattttggtgtttttgtagtaaatacttaatgatctatccagcacattcatttttaatgtttcacaaacatcttgtacgagagagaaaaaattggccatttatttagcagagtgaagtcatgagagcactgtatttggtaaagtgttagtatattcttaatgtattgccatctgaacccaggttggtttaggcatatgaccttgtctcttctgtggtttctacctagaaattcagctgttactaatggccatggtgctgtccctccaaatggagcataaagtattgctagctttccctttggccttgaatgaaaaggacagtggttcagttactaattcagttacatataatgttgctaatgtagttcagggtctaaaaaattattaactaaaataatagagtaaaaaaatctggggtttcaatggtcaagaacatttgctcttgtggagggtttgagctcgtttcccagggctcagattaggcagcttccaagcgcttgtaacgagagctagaggatttggcactagccttttggtgtcagtcttcatgtgcacatactcatgtacatagaaataaaaattgaacatctttagactaaaatctacctccctagttattctttccataaatttggaaagttttacagattctcttaaggaaattgcaaaattttgagccctgtgttgttccaagttttttatttagaacttctggttaaacacagggatgtatacaacctagagaagcactctaccactttaaaagaaagagaagttttattttgagacatgggatcttgccaagtttccaaggctgacccctaaatgcagcttacagttccacttgtgatcttctagcctcagtgtctgagcaactagagttttctgtctgtcccactgggactggttttttgttgttttttgttttgtgtatttctaaattaggtggtgctgaaaacgtgttgttagttggattaaaatgtttatccatgaattcaaagtatatacctaaaacatctaagttgtacctacaaaattagtgtttagattcatgtccagaaataagcatacaccccttcttgaggccagcagtcccacttaagactcctgctggaatttccttgtgataatgaaatgaagtttcctgcttcctattgttccaaccctccctctggagacaaatgaaaagtgttccttttatttttcagatatttgaccatagctgtctccccacatcacccataagcttcagcttttccgaatgaacatccttgatgggctttgtctccccatcccagttgtccaccagtattactaatggctctctacaagtgtggtacccatagcttctctcagttctttagtgaaatggaattatgtcctccttgaaaagagaaaacataattgcctttgcttccttgtactatgctttggactcagggcattcttcagtgggatgttaaatctgctcaaggctgtattggaatcaggaaacatgggaacactttaccttgtggatctctgtcttcctcatgttatccatctgtgttattgtattggaatcagagtgaacactggggtcctgttcccaggaaggagaagtaggataagcagatgtctgggttaagaatgagtaataaccaaggcaggaatctggagtctagaggagggagaagccagagcattagaggcctggaaggcactgaggagatgggtcctggcatctgcataggtgctctttaatattattagtctttccttcgaaacactgtttactagcagtgtttataggtaattttaaagaactagaacttgaaattggttgcctctttttgaatgtcaactgtcaagcaaaactaggcagctgaggcatctccctcagtgcctcacactttcccattttttaagaaattaaaaaaatttcttccttaaaagtgtcatgtgttgctggggcagtggtggcgcgcgcctttaatcccagcactcagaggcagaggcaggtggatctctgagtttgaggccagcctggtctacagagtgagttccaggatgccaggactatttcacagagaaaccctgtttcaacccccccccccaaaaaaaatgtcatgtgtttcaaaaccataaactccttgattgcttgctctggtcacccattttccattctttctagttgcactattaatgggctcctttttcttttttaaaataaaaaccagtcaagaaggcatgctactgacaatctgttgaagtttatgaggaaaaccttatgtaggtagtctcataggagcccatttagagaattatggttgttttgaaatctgttaaaatgtagcaaataataagtttgttgtagaatccagaaaaagacaaaacaaaacatatctttgtcttgtctcccctgaattcttttagtctcctacattttctatagttttttgtaacagtatatattggttatgtgaaacacactaactcatgattatacagagcctcctgatttattgtttcattctactgattcagaggcatatgtatgtggttttatcagataagtggataaggcaaaagtttactgaaactctgatcttcaaattattagcaccaaatactatccatagtcttttacattaaggaaaacaaactgtatatttttgaaaaaaatccatcacatattcaagtcttatgagagccatagttaacattaaaatgttatatccttccattctgatgcataggataatcgaaaattgtataccttttccattttgtcatgagattaaaatgtttactcatagataagacttgttaatttttcttgctttgccaataataccctctaagaaaacttgattttctaccttcagttgtgagcatctggcaggatagaatacatacagtctactgtggcccatcaccacagcctagcttgacaaccaacagcagtatgcatttgcacgagtaccagtgctactcactgggaaaggtgaaccaaaacaacatcttagcagtatgactgtattttttttttttttttacatggaaacctgccccagaacttttatgccccactttttaaatgaatccctgctttgggatttttcagttgcatggttgggaacccatttgtgtgaaaaacagatccaagtacttctgaaagatcttgagatttgtgctaatgtagctatcttcttaggaggtgctttttgtcccagtgacctttcataacgaatatcttgtcataggaagttaaatctctagaacaaaactctgggctctaaggctcctctgttgttttagaatctgggtttcatttaagtagcaatgtgacagttttgaggaaattaaaaatactgaccaaattatacttttagaaaataagattctactaagtaaaatatcttacatgtgacatttcattctttgcttcagagagttggccatggagataagaaccatgcagatgcagacagatcacctgttttccttcaatttattgactgtgtctggcagatgacaagacaggtaacgcatcatctattaatacccttctcacacatctctaagctcaaagtggggaaacttgatcactgtttggcttgtgattcttgggtagaattcccagtgataacagctgttactgttgggcattaaaactttttagaagttttaatatgaataaagagcttgatactagtagcatcgcaaccaggggaactgataaaaatgaagattcctcctgtataataatagtcctttgctcactgaaagctctgtatactttgctaaggaagatgaagaaacgagctacattgattccagtcggaaccagacactattttgagtccttttagctgttttaaagaaagaagtatttggacagagtatcaaggcagcgatcacttggccccttctcaatgtggagctgttagaaccctgtaacagcctttgaagtagttgggtaaactgaccagtcttgaaaggtactagaagataacacttggttttacaataggaaacggggctgcagggtcttgaaaatggtttcaggagtagggttaagcctgaaggcatagttcttgttactggagacataccagtaagataaataaggcaagaatttgacccagctgtctgattggtaggatccaccaaggtcactaggtataacctgggagctgtgactgactagagtgctgtttgggtaggatggggagacattttttagaaatttaattctaaactaagaagggggaaaaaaaaaaccagaagttgaaagttaatttaatcagcattttaattacttagcaaaacaagcattagcagtaaactacatgtctccatagattttagttgacaggaactttttctaaaataccaagacagtattttccaggttgttgtggaatttttcacaaactattcagatttacaagtatgtttctgaatgattttgaaataataacagggtggattaaattaagccttttactaccttttggtggtctgtaatttaattcttcctttggtcctccaaaattggattgtataaaattaagatacccactgaagcttgtataggggtgaattctgtgttggactgatgttgccaattgtgaattacaaggacctgttcttcaacaagataaataggttgacttgtaagttgactgcatagctgcacagttacttacttctgtgtatatagtgatggcatttgccaaacacatttgttatttttaattcttagaaataagatgtgatgaaaactaataaacatggaagaccagactcatcagaattgctccaagtcataagtcagtggctggcaactatagggtcaaggcagagcagacacaaaaccagcattaagtccactcaatacttgctgcatgagagaaactctaccttgcaaaggaaaacatgccacaaatgcttaggtagtttcaaatctgtctaagtattattacagaggatctactcacgacagggataattatccctgaaaaatgtcttaaatttgtgtgctcaattttgcagttccctactgcgtttgaattcaatgaatatttcctcattaccatcctggaccacttgtacagctgtttatttgggacattcctctgtaacagcgaacagcagagggggaaggaggtaaggtatagctctggctcttactctggtatttggttttttgtatctcacaagatatactagtatatacttccatccgtgaagtgtgggggtgagaaaatcacacctataatcccagatactccagagggtaaggtagaaggatcacaaatctgaggccagcctttttaaacagatcccatctcaaaagacgtctgaagaaaagaggatgctggagatgtagagttcagtgatggactgcttgcctagtgctgtgaagtgctgggttcaatcctgctacaacaaaaacaaacaaaagaaccactctgtagaagcatcactgttggtggtactggtagttccctccatgcacatcaatgttcatcctaaaaactgtcagaaaataagggtactcacactgaaaagccttgctaccaggttcagatgttactcactaatatgcatgttcattcttatttctgtaaagcaggcaagtagatgaaaattaagtgcttcttagactgtactttgcaggtattgtatcttacagtgaatgtatttctgtgcatggtaggctttccatatgttacgtggtactagataatcaccaatagagcactgcagtgttctaattactatcacttttgagaaacccccttgatttaagtcttagctgtaatttaaataccataagccctcttttaaagtggtaatttaatggtatagccacagaattggaaccatcaaaatttagagcattttcatcacaccagtcacccatacctgtctatccacattctctcaggtttgggtagatactaacctggtttctcaggaattatgcactgtcattcaccatgtgaaatttgtgtctagctccttgcattatcttttcaacatttatgtcatagtactttcttttcttcatggtcaaataatcttccattgtctcaaatcaatcttcctttgggttctttattttggttgttgtgaatagtattgctttaaacatatggagcacttttattttttgtgtatgggcatgtgtgtttgtgcatgggagaccagagaggatattagatgccctgcagctaatgttttgagctacccaatgtggataaattttgatcctatctccagcactgaggcactttatgtaccagtgtttttcaatctgcaaatacaactgttgggcatttcatgttaactgtgttcatttccatcaaagtaggtctattagcagttagtttcctctattgttgactttaataatcacacagtacacaagtactgctgatgtggtggggaatctttaccagttttttcctcttgcagaatcttcctaagaggacagtgtcattatggtcctacataaacagccagctggaagatttcaccaatcctctctatggaagctactccaatcatgtcctttacccagtagccagcatgcgccaccttgaactctgggtaggatattacataaggtggaacccccgaatgaaaccacaggtacagatctacaatatacagtataactctactaggtctgtcacactctctctgtccattagtaattacaatccacagagtcacagaagcactgcataagacaggagactttcccaagtgcacacatcctgaagaaaataactttataaaagcctaaaaacagcaggtccacagttctgaagagttttagctagatgatgtatttgtaaagtagcatcttccagaaacgtaaagacattgaaagatcagtgatgacaataaaaccttgctttaattccactgaggaactcggtgtcacaaagccagacgaatggttaagatcttgtttggctgggattcctattacagtaattttgtttgctcttgcaggaacccatccacaacagatacaaagaacttcttgccaaaagagcagagcttcagagaaaagtagaagaacttcaaagagaaatttccaaccgctcaacctcctcctcagagagagccagctctcctgcacagtgtgtgactcctgttcaaactgttgtatgaaaggactattaggtcaagggcctcactgccaggaacttgacattacagcaccttacgggtagaaagccttccatgtttttaaacccatctatgggagaaaccttcagatgctgtatttatttcaagtctctcttagatgagtttggaaatgtctggtgcaggtgacaatggaaatcatttcatttgtaattaaagtatgacactaacttaagtcacccaaagaatactaaagtactggagtcctatttccacagtggggacacgtttttaattttaaaatgtcttaaaaaccaagcacctggtaagatctctaggtgggagaaaagaaagagcagctgttctaatacccaagagcatatgtctgggccttcatgtaaatgtcagatcaaattactcccttctcagatttctcaatttttgtggtatttaacagtaaaaaccattgttttgagattattactgcatatcaatagttaaaaattgctgctgacattgtaactagggtattttcaacagcagttaggaaatgatgccttatatatgtgctttggggggatgaggggacaaagcagtatctgtcatccaggaattcaaagaacattccacacccttcagactaatttacatttgtgtgttaatcgctaacatcacagaagacattttagaaactattactctattttatcttagtgataattggcaagttttaaagtctgactttagtgctatgtttaaatttcacatgaacagtttaccaaagaacacactgcatgtaaggaattacaatctaagtgccagcaagtaaagccttgtttctctattcacctgagttgggtgctggtgtgaacaactgacctcctggtatccattttactctgtataagagccatatgtaatgtactgtaacaaaggagcttattaccacttggtcttttaattaaatgacttcaaactttgtccttgtccacagttgtctaaagtatctaccccagccccactccctaaatgttacctagaaatgttcaatttgagcccacctgtccttgacacctaaatcaaactataaaaataaccctaacctcagtcactagttcattattttctgaactgtcattgtattgttgatgctggaattagtacaatgcatacatgcatagaagtctccctatccctctttcttttatttatttttgcttgtttgttgaatctagagcctcacacttgccaggcaagtgcattcccagtattaacaaaactgatggcaaatgatttggtttgatataaaattataagaaaaattttaggaggtatttatgttactaacagtactcaaaataagtttttgagtagtagtttgtactttttttgtactttcgtcattgaaactgatatggtacaaagggatgccggcagaatccagacattaaagctgatcgtacaatcactcaaaaatcagaaggatcatgtttcccttcaaaaccttctgatggtcttctatgacctccaagaaatttcagtgtggtgtgtacacactaaaagcacttcatgtggaatccaactgcattcctggcactcctttcttattcagcataggatccacgttgacatcttgtacaaagtataaaggagcaagcgaacaagaaactgaaggagaatcaaaacccaaagccctaggatccagctagagataggtaagattgagcatctttcaattactatctaattaggagttggagccattgccactcaaatgacagttatagagtttaatgttctaatattcaaacaagttaacacaagtgtagttagttgaactggtggtcgaaatataatatttaccatgtcatcagagcagtttctcaccttcctggggtctatggactcactgctgtcaattcattgttgctgcaaacctgcttgtcagaaaattgcacacacaagtaaagtttatatacaatttcaggaggtttataaatctcaaatctgtaagaactctgagaatccttaactagaaaattgtagcatgatcagttcatgctagtaagctataatccataacctccacctcaattcctttagtatatggctggcatgttcatcagcctatctgaatcactcaaccaggcacactgagcttagatcttgaaaagcaggagaatgataaacatgcactgaagactctctcaatcaggatactaatatgcactcttgagattgtgcaacaaataaagcctttgttagctggctaatagaataagttttaaaattgctttattgatttcagtaccaaatttataaagtttaacatgtcaatctattcaaaattataatttacattgacataatgatagttgtctgtgctcaacacacacactacccttattctgtatgctaaaagcatggggttcaagattaaaaaccagtgcttaattgagtaacatgattacaaaaaattgcagatgtgtacatttcacaaccttccccccttctcctaattctttatttcaaaagttcattgatttcattaacaactgtctttagttttatgaagatgttgttagatatttcatggataacttaaaatgtttgggtctttaagagtgacttaatgcttatcaacatctgaaataaccaaaaaccagaacaaaacaaagtcctcttaaatatataaatatttaaatacagaaatcctctatcagtagttgaaaacagtacatttaatggtcatctggagaggggaaagtagaggtcacttcatgcctggggaagatttaaaaatgagacttttcaagcactgactacggggacagcctcattctgaattttcaaacccaatttacatatagtcctactttaaaaaaacacccacaagtaaaaacctggtcatttgtttacaaagtgcagtatatgagtatagcaaattcaaacagtacaagcctctcatggtgtaaaactccatttccacgtagttgtgctgcatgacacaagagactgtaatgaagcttgggcccctggacacctgctagtaatggcaacattagcaagcatgaaacctggaaagtcttattgttattgtccaataaggtatatcgtttatgatctggtgtcagtaatcccaacacagattactgctttgcagtgaattctgtatggtttgcatgtccttcaataactgaagatttttcctgcttttttctccaggtctctgtttggcaaaatccttcttacttgtggtccttgtgactccaggtgaccgattgctgctgtttccttcttcatcaagagtctttttgttaggttttaattccttcttctgcttatctatgttttgtttctccagctatccaaataatcaaggcagggaaaaaaatagaattcaataaaaaatattttcttttagctcaagtactttgtttttgacacagggtcttcctatatacagtcttaaattcttgatcctcctgcctcaacctcctgagtataccaataattaatcttctaacactcaaatgatacattctaggtgttttttaaagcacataaatctgcagaaatcataaatcatttagtattcagtgcttaagtatgtaaaaacacatagactaaaataaaaggtgtacccacattaaataaatctactcggaactttcatctagagaaacagcccatgtatttgagattactatgaaacagaaccagaacaaaaggggagtccagttcctgggctgacagtaactggagtttggggagaagtgggcaaagctgaagtagtaggtttggtataagcaaacaaactactttttcacatatttaatctgacttactagttgacaactgaaaaactctaggtgtattttacacaatttaatttggtcaaactcaaccacttaaatttgtccagaagttttttattcataaggctaaggatattaaatatattcagtaaaaacatatatgaaacctaagtaaaaattaatacttctttaaaccatgtaacacagactgactgttaataaaaaagaaaaaaaaatcctcaggaacaacctagacaagtaaacacaccttagcatcatcaattaatatatatgaagggagaaagttaatcatcacaaacaagcgaagggaaggagttacctgtgcttggtatttccgcactttagttatctggttggcctttgcttccattcttcccactaatgcctccaattcacactccaagttgtctttcagttccacagttggtgactcctgtatgagtttagcaagctgctggtgatcactacacacaaaacacaagtggaacttccttaagtttcccatgtttaacaattatattctttaaatctcagcatgggaatttattaatattgataaataatatatatatgagacccattttgagacccattttgctttttaaaagaagtgctgctgcttccacggaacctgagttcagttccagcaaccacatcatataggtggctcacaaccaccaatgacccagctccaggatctctggtgtctcctgacctccttgggcatctgcacatgtgatatatacatacatgaaaagtcaatacaaaatgaaggtatatgcaagtattcttaattccagacaagtttgtgttcttccagggttgtaggcttgtaaatggagtttttaattggtctaaagtaataaccaggagtcagatatagaggacaatgctgagagaccagagagaaggagcaagccacagcacaccttacctctttagtgtctccacagacatgagaacgagtttctgtttctccctgcttatatcctgtttctgcccagctatctcaccttcatgtctgtctgtacatacctctatggttagctagtggcaagcttcattttctgaccttcagacagattttatttgtacaagcaagatatcactacataggttaacatacgtttatctactttttgctccctccatgaacactacatatgaataaattctactggatgacactggttttcaagcactgtcctaacttaccagttacatttagctaatccacaatacttttaaccttttgcatgatattagacatctaacaaaattagaaaaggaggtcttagacatgacatttacatttatttaactccgaacctgtgtagggattattgctcaacatctgttaacaaaatcaggattaataaggcagctaaaaaatgagattttagaaccaaatgcaattttaaattcaaaaactcaaaactcacaagctcatttgcccaaattcatcctgcagagtctctaagacatccgacagttcttcactgacactgccagagggaggtgtcactgacttcttactactcctgcaacctcgtgaacaggcttgctttgccaaggggacactgttaacaactcgatcattgcacaaagctttactgtggtgcttcatcagatgcaagacatgttgaacgttggctaccacggcatggctgggactggtggactaaagagaaaagttaaacaagcaatatcctctattcccgttttctagtttttaacctgggcatagtaaaccacctgtaaaatctccaaaccagcaaccactcatccaccctgtgtcatatacttagtctaacatcatataaacgtggatgtgttggtgcacatctgtaattccagcacttgggaggtagaggcaagagaagaccaaaaactgttcatcctctgctacagtggggttcaagacctcatctaaaaccaaacagaccaacaccactaaaaacaaaatagccaactggccttcctgcctcatccttgtgttcttagctccagtcctacaattattctacctgaaatccagtgttgtgcccctataagtgtagaacacaaccacacttctgcttaacctctacagtctcttaatcatgtgagcaaattttatttgcaggtgacatttctttggtgaagcaactttcttaccctaccttaaagactagtccaaatataccatttctaaaagcctgcgaaattaactactccacttctcagcacactgacaatttttacatctgtctgtctttgtttatcacaacatattctacgtgtctgcatgtcttttacctactcacttgatcttctaggtcctagaacagtggttctcaaccatcctaatgctgcaaccctttcatataataataaaattatttgattgctactttataattttgctactgctatgaatcgtgatgtaattaccagtttttgtaaatatctgcacaatgcttgagtaataggaaacactgaagtgtatctgccacatcataaacagaagaataaagcctgatacccgtctcaagcttcttgttttcaatgggaaataacaatctcaatagttggctgggcttgttgagctccataagctcagcagaaaacttgcttaaaatgcagacttgtgggaagaacctaagactcaatgtgttcatttcttacaaatgagtttgcatgaactttagtttgtcacactggaaaaagaattatacaccaaacctgagtgggataatcctaggaatgcaaaggtgatgaatgacaatcagaataatcattacttgccagtaacttaaacacacataatggccagtgtgtatactttaatatgcaatgagcaagttttgaaaatttttgttactgttacttttctgattcataatgtaattttatgtcagttgagtctagtaatgaaagatttgggcttttaagtcttacttttccagtgactcatttttattatatatgtaagcatggctctatagcagtaagtacttttaaaactggttattcaaaatctgtagaatgaaactcaattgctttaagcaactgtattttcttaaaacttttagaataacattttataaggaatatataaaagaacttcaaaaggagttcacactgaaaagctgagtactgtcctttgtgagtaaaggcttcaatgagaattaccaaagacaacaacatgggtatgatgagactacagacaggacaaagaatgaagactgtcaggtggacaagggtaaatgtctcactacaaatttaaaaatcctatttagggacagcgtgatgactcagtatgtaaaagcactcttgctgtataagcctgatgacccgagttctatctctagaacccattgtagaaagagagaactcccttcaagttgtaccttgacctctccacatgcattggtgccccctcattttttcacaatgaaaacaatgtttttaataaacacactaatcaaaatataacaaaaaataacttcacaaccatacttatagaggcttatacaaagtcaggagaaaacttgttccttgagttgattttataaatagtaggctgtgccttctaaaaggttttcctagagccaggtatggtggttcatacctataatcccagaagtgatgaggcagaaggattttttttttttaaagttcaaattctgcttataacccctaaaatgtgttctaaagactgaaacaggctggagatggctcagcagttaagaacacaggctgatcttccattggaattccaggttcaatttccaacacccacatggcagctgactatcatctagagcactagtcctaggggatcccataccctctactggcctctgtggacattaaacagatggtacacagacatataggttggcaaaacacccatatacataaaagaaaaaaaaaaagacattgaagtaatttaaaaataagtatcaatagctataactcacctttccagcaacaaagggcatatcgcctaagcacaatctgtaatgtggctgtgcaccaaaatagttcctaggacctttctagaaggagaaaaaaaaagccatttcatttaatttggtgaactaacccaagattccagctcaccgtgaaactactgattggataattagctacaccggtccctttttgctactgtgaccaaatagcaacaaggcttcaagaagctatttaagaagggatttacttggcccacagtttgataagatacaactcatcatggaaaacacatggcaacagtagtctgggttgggtggattttcattagactgtaccaaacagtagaaagcagagacagaggacaggaagtgggccaggctcagaatctcaaggcttgctttctagtgacttaatgggggccatttcacatttaaaccataacacttgtttatattgggactcataatattgcttggaaggcagagtactaacaaaacagttatcaagagttaagtagaggaacagtattcaagaagcattttaagagtcaaaggtagtgaacacagctgaatattcccagttgtatgttctttggtaattcccaatgctttcatatgggccctcactaccagggttaagtattcaaaagtaaaatttatttatcttcaggttttagtacagaaactaagaatgaaagactcactctcccaagatcctaataccacatggcttgagtgttgtttacacaaattattacacaaaattggtaagactaactagttcaattttcataccttttctggtggttttgactttttttttttaatttttctagtgttggttgcaacatacgaagaagttgtcttatcttcaaaaataagtctatttgcttctagaccagtctgcaannnnnnnnnnagaaaagttacaatccacatttgaggtgccatataaataagtctataactacaatggtagtcatctcactgaaagcaatggcatgactatacagtatgtcttcagtctctcatttatgtgaactgctgatctatagttgatcatgtcttgcttggaagcactgttctactactggtagttactctgcagattctacttcaggaatgaaatggaatgcatgtagctctaaactgactgtgctctatacagacaagtaagcaaaacacaatataaataaaaataaatcttgggggggggcagaggcggaagctgcaattttctctaaactatttttcaacagccccactctccaaaaatctgtgaaagtggttatctttctatacatcaaaaatagtctggagtttggtaaaaattctaatgaccagcttcctccccccaaagagtttaaaaattcacaatgagggaagtttcccagaaatcatgactgagttttcagaaacagcacagtaatgaatgaaatgcaaggaacactaaaaacatcccttcattatctcatgcactcttaggacagcatagtccctggcagtagaatgctaaactctccatcctcagaagcacgacacactagacataattccacagggtattatccttctggaatacttacactgtcaacaagtgtcaacagtaacaaatgaactacttaagggctacttttgatcacttcttgtttgatttccctagcactataaaatccaggatctggatggctaaatactctgttcagaacagcaagatagagaaatatcattattcaccacctgccttccactaccatagcgttcatcatcagaacttggtaagaattcatcaatcaatgaatttgtgaaactttctatttagcatataaggactatagactataatttaataaagaaaacctcatacttttgcaatgttacatgtaaggaatagagacatcttaaaatagttttccctaaagtcacaacaaattcactaaagatcaaaaatggttaagtgaccatttaactcagtaagcacacagagaaaagtaaatctataaatcatatcaggtttaataagaaataggcatatacaatcagtgactcaaagaagcaataaaagaaagagactgtagtatttgcatcggaagctgtgagaatgcaggacactagacagatgccataggcttaattgcttaattgcaaacttctcagatcaggacctttgggttactatgataaaagctacaaacataagcataatcttaaagaggatagaaaagagagactaggaaatatctgagcaaataaccatagagaaaagtgtgtcttgttaaaatacaaaataactttatcttacagagtctaagacttctgtgttggacatgtttttacctcacaggtttttattttatgtgcatggatttatgtattacaaaactgcctgcatttatgtacgtgcatgtgcctgggcccaaggattagaatactgtcagactctggaattggagttacagatggttgtaggccaccatgtgggttgctgagaagcagtcaggtccactgcaaggacaatcacatgctctgatctctgtaccatctctccagctccaacctcatgggttttaaaaatactaatccagacttcataatttgaaacatccaaagaactgctcaaattttactttgcaaagttacattcctaatttccaatactaagctatctcttgaggtctacatgtagatctggtgtgctcatatgtaacagttcaccactgaaacacttatttaactgttcaccattccacttacctctgctgcttgtgcctgcatacgcttcctttcctgctcttcttcatgaagtttagactccaactcttgcatctttttctagtaataagagtatcagagcagataatggttaaaagtatctacttgtagagttttaaggatagtcaaaataagcatgttagttcactctagtaatggtttgggccttgataatatccatgatactccaaatcaactaatagtaattagtgatgtagatatgatttaagtggccagagtatgggggaaaaatcccatggccaaagaacacagctttgtataaaggttaaaataacaaatacaaatctagatcttcactcagtagtattaaataactctcaagtaaaacacaattaaaagtaaaattagttcagaaaaaatttatatgatgcaagttttaagtatcaaaaccattttggctttcactgttttcaaaaagaactaccttatgtccagccaccaagactgcaaaatgtcaacattccatttcaaattattttcttcttaaagtctatgtgtaagaccattacattataaatatccatgtttatgaaaaaatagtgacaaccacagcacactacatcagtaagtaaaaaagtcatgttcactaacttctgcaaggacctgcatcgtagtgagtttgctgtattcctgttcaagaagatccagtttttccagctggctctgaacatggttttgatcatgttgccgttctttttctagtgaaacctgagaaatagcatcaaaatgcaatataatttgatgattaaaaagttgaaaacagcacacacccaacataatactatgtgtaatttgcctgtcctcctacagaccctctgcgggatatggaaaggaattctaggaatggaacactaagagaagatctcagggtaccaatcatctgtctgtctcattttgtatgtgtatgcatagcgtgccttttgatagcagaggacatcttttaagagctggtttcctctttttgatatgtggatcccagggatcaaacttgatctttcaggcctcaaagaaagtgcctttattcactaagccatctcagcaggattggaatattattctcagtatagtattttatcaagtataaggttttacataagggcatatacctttataacctaggatagaagatttactagacacaagcgacaaatatttccagtcagtctggtcccatttattaatctcttaataactataagaacttgaatgcatttatttccttttgaatacatgttctttttttccttcaaacttaggatgatttggaaagactgcccatatacttaaggataacagtctcagaataaacaaatcagaaaaaaatgggcaaaatagactaattggatatgtttggaaaagcccaacactaagtatctgaatatgccattgccatttcttcaaatgtccatgacagtggggaattatacaagagaactttgaataatgaaacaatccacgcaataacacagtgaagacatgtaaactgtgattaatcactggctcactggcacatctttcccaacactgctgtataactgcttaagccttaaattaggatcaagaattgacatggactagaaaatagtatttctcttttacaaccgtagattatctagcatttaagcatataaaaaaatcatattttgcataataaagttaaagtgtacatatgaaaaggatgaataaaaagtatactggacactgatgttgtatttcctctacaaatgtgtaagttacttaagtacaaagttgcaacaggagaaaagcattttgtttataaagtttagcaagatagtagcagggcacattaacaaaaacctagcaccagagaaagcctcagatgcaatccacagtatcacatacaccaagtgtagtggtatgtgcctataaactcagcactttggagatgaggtcagggagatgaaaagggccatgtcatgcctggataaaataataaaccagcctaggctcagagagaccctgtttcaataagcaaattaattataaggttttgttttttttttttaactgcaaggaattttacaaagcttagtgggtcgggggtacatatggttatttacacatttgataatgcagactccaaaacattaacatgactattttttagatttaagcacaagtctaccaagtacaagaatcctacatagtaaacagagccaatcaaactaccatctactacactaagccaaatcaattccagcatggagctttaacagcagtgccatcagcccatcagcctctctaaaaagaggtctgctaatcatctgtcaccattcttcatttcatctggaaggcaccatacctgcttttctaagacagatgtcctctccatttctgcgtgctttatcatatttcgcatgtattccaattgtttttctaacagattacatttattttctgcagctaacaactgagatgtcagttctaaaatgaacacacacaaaaaaagtagtaatcagctaacccagaggattgtcccaacagcttgtaaataggaagtggactttacagtagtacatacatagagctagctaatcatagagctagaggtaaggtttgttgtagagtgcttgctcagtatgcctgagtactgcaaaacaaaacagctgccctccaaaaccgccagtcctcccagtagtctggaaacctctctggatgacttatgttcttcttatgctaagtcacatatgccacactatcaataagcactatgcatgatgtcacttgctcctcacaatacatctgattgtgatgtaattatgtaatgcttagagtcaccatcacaacataccaacgtgaaatctaaaataatttcacaatatttggatagatcctactttccttcttcaacaaaccttgattgtgttttgattcttcattctttgaattctctctctcttgtatctgttcatccaatactttcttatattcaattgtttccctagacaaggttttcacactttcttctgcctgaatcctttccagttccaagcgtcgaatcttctcttgaagattcttaagagcagaaaatatggctgcaaagtagaaaatgcacaccttaagtaatgtacatagaagctcaccaaaaaactttctgacagattctcattgtgtaccgcaaaatggtcattcaagagttaggttacaggtgtgagccatagagcccaggtctgaaaagaaaattttagaagacagacactagtcaagtgagagatcactcttagaaaacaaagcataatcttctaattaaaaagtcatcccaaggctttgtttcaaattctttaaaaggttctactagttactaagtaaaaactataaaaacccaccactggggtttaaaaaaacaaacaaccaaaacaccttggcttatcatacataaattcacaaccatcctgtggtgctttgagtaagaatggcccccctctgaggctaaagaaagctactaaggccaggcatgtgtcaggggtgtgcctgaacatagcaactcttataaaggaaagcattatgtgaaaatgtgaaggtgaaacctagattgtgttggactctccaagatgctggagatgccagagtcatgggacacctggcaaggaaagctgctacaggctgtggaaccagtccaaaagaaagcagtgtgctacagccaacaaagctgaaagaaactgtaaatctgaagatctcttggatatcacacaaaatgcagaagttggagtttgccatgctggttttcagtcttgctctggtctagtatttcctcactctattcccttccttcccttttggaatggtaatatatattctgtggcactgtattttggaagtatataacctgctttttaaatcttgattttacaaggggcacaatgaagagatttccatgagtctcagaagagactttaaactttgaatttttaaagggttgagagactattgggacttttgaagttggactaaaagcatttttgcaacatcacgatatggctacaagcttataagggccagggagtgtggtttgaataataatgcccccataggcttatatttgaatggttggtcaacagcactacttgctggaggacgtgtggccttgctgaaggatatgtgtatcactggtgggtaggctttgaggtttcagaagcccacaccaggtccagtgtctctctcttcctaccttcagatccagatacagaattcaaagatacttctccagcaccatgtctgcctccacactccctgctatgaactaaatgaactaaacctctgaaactataagtgacccagttaaatgttttcctttataagcatttccgtggtcatggtgtctcttcacagcaatacagcactggcagatactcccaaagtacattattaaatgctgttaaccactaggatgctgggtgatgcactgaaatcagagcagctatggctatccacagaagaccctcttaaaagatgtccaaacattccctcctggaagatgaggaggctcatacactaccaagcagctcagaaggaaggatacaaggcccttctccctagagattcctcagaggttgctaataactgtcagctcaggggagactcctccttagtcaactataagttgcccgtgttcatgtgaggaagctcagaaaactcactgcttcatcaaatttgtctttaatggaatcatctctttggtctattgttggcacctctctacgcaagcagacatttgttcatgtattcccagcaacaggcatacaacagatgcctcaaatctttcttgctgtgtgcacaccaaatgcataaataagccaaggtcaggggccaaccttggcttctactcctcagataatacagtgtttgttcaaccaaggtctttcacaactgaagctcactggttcggctatgttgggtggacagtgagtcccagagacctgtctgtctctggcacactactgcactaggaacaaggtgtcaaaaagcctggcttaaaaaaaaaaaaaaaaaaaaaaaaaaattattggaatggttttatcttttgacactttcacatatgtatgtaatataccttgatcatgttcacctacttccttccacagtcccccaggacctgacccccaaacacaatacaccccataatgtctgtcttctttacaaaaatgtaattcaaagtctagtaagtgctgtcaacctaatgactctgactttttaaaaagatacttatttatttaatgggtatgggtgttttgcctgtatgtacatctgtgtactatatgcatgcccaattcccagttgcccgaagagggtgtcagttgtgaactgccatgagagtgcaaggtcctcaaagcactaggtcctcttgaagagcatctctactgatgccatctctccagcccctgcctaacacttaggctcctgactgattctggaaatgacagactagtaataagtgactcaaagtattttagcttccatgactcggtggataatgtttagcaatcaatacaaaaagctctataaattcacacaaataaaggggaaaatatatgctgttctaatttcaaaacaaaagaggtcaaaactaagaattttaaactaaccagtaaacaaataacatttcctttgttacagttggttacctctgcttacctctgctgttgctttctggataggcaaatgtgggcttatttggggatcgtcgtagatcactattaaggaaaggcttatcagatggatataatacatatggagatggagaatgacgaatcatacttccattcgaccttgatggtttagttaggatgttctgaaaaagaaaataataaaattaccttttcaacatttaaagctaatactcatgactgagaaacactgtatgtttctctaaaagacaacagaaaaaaactgatttcacagaagaacccaaacattattgtcaagagatgaaaagccacatggcaaaaaaaaaaatccttctcacacaacctcactacaaatatttacacaagttaaatctttgttcagatcagaaacagatgcaatttgctgaattatattctatccccaataaacaaaatatatgccaaatatttataatgacccaaaactccctaaataaagcatgttcggctgggcgtcggtggtagcatgcctttaatcccagcacttgggaggcagaggcaggaggatctctgtgagttcgaggccagcctggtctccaaagggagtgccaggataggctccaaagctacacagagaaaccctgtctcgaaaaacaaaaaataaaaacaaaaaaacaacaaaagaaagcatgttcatatattaagaatttatacttagcaaaaaggggaaacaactataaaacatttggtcttatcacatattctcatgtaaaactatttttccacatataccatctgccacaaatctgtcaaatttggtgttaatttctacatgttacaaatttaatatagtgtacctctgaatgttaactgaagtttagtagtaggtgagtctgtggtgtaggaggacacttagataagtagtagttgagtttttggttcaggacacttaaataagagggaaataatgacaatgctaggagctaaggaagaagacaggatggctgccagctgttcagaattctcacacatctagttcccctttcagactgccacacaaattaggattttcaattttcttaagaacactattgccaaaatattatgtagtctgtgtaggtacaaaggaacgataagtattcacaacaataaaccacttcctgaataaacagaattatccaaataactacataataaagatttgtacttttgtgttaccgtaatacaaacttgagtggatttataagagcaattacaaaacacactgttgctgtgaaaattataagggggcaatgagcttaggaaattcggtaggtacaagtctcaaaaagagccctagtgcactacaagtgctaccatttcttagccttttgcctataatgagagctctatctgttgtaacatatgggctcagggagtaacatttatccttttagaagtctaatggcaaaaaaaaaaaaaaaaaaaaaaaaaaaaaaaaggcaagttggcatgaggtttttgaaggcaatttaaaaaacagttttaatttaatttttaaaaatgtaaaatatagtcaatgttattatatagcattagaattgtcccgaaccttgatctagcactgcatataattaacagagaacattggattttagtttctagctagaaactgctagaattccatcatttaacattcaaagtaagctaagagattttactgtagaattccccctcacaaaatcagcagaagcaacccaaaccaaataatcaactagttctaaatagaaaacccatgaattagctcttcaatctgccaaaactgcagcaaacaaaaaccttgtctgtctcagcttaccctcttaccctctcaaagtctcacctcctacaattaaacccctcttggtacctctcagtcccctgtccactacatttttcccagtgtcataaaaggataaaaacaaaacctcttcctgaactccaagactcctcaaccttagactgatttctgactttttaaaaaaaacacaatctagccagtggataaagctgcttgctgaacaaggttaatgacccaagccagctccccagaagccactaaggtggaaggaggcaatttcaaagctgtcgtctgacctccaggagcaaactgtggcatgtgcaccacacacacattctcatgtacacactaaaaaaactagaagcacggatcacagaaatcatttatctaagcattttactcagtggaggaagcaacagtgatttcccttcaatctcctaggtctcttcctcataaactccctggatcgctcctcccgcttttattaaatgttagagtttcccaaagtttgattcttaaggttccttttatgtctacattgattctctttttttaaagaaatctcatctactacaagcctcttaatttttatttgccagcagctttcaagttaaaatatggaactgagatctaaatctaaaactccaaactcacatcactgattacctacttggatgtcttatcaggcacctaaaatttaactccactacaaccaaattcttgtttagttgccaaatctgctcctcacacacaataccaaaacaactggcactgccatttatgaaactgctctgtacaaaaccattgtgtagagtcattttcattcactcaaatctaatctctctgcaaatcactcaggggtctttctctataacacatttagaatccctactactgcagatattgctgctgtttttttttttttaagtttgaatagctatgaaattctaactgttcttcacgcttaagtatgctctcccaaacagcttgctagtgatgatcctaaaaggagtgagagcttcaagttaatatttctaatcaaaactctcctatggttttccaaaacagagcacaatcccgaattcttaccataaaacctccacataatgtagtttctgttgtttcatttcctgacacacacatttgatactgtctctctaccaattttccaaaaatagggccaaaagaaaatagcagtgcacaaaatacatatactttcctattgaacaggctttaggatttcagttgtgcgtaccaaaaggactaaggattaactacatcttgtctcctatatagtttatgcacccagacacttgtttctgccagtcttacttttaccctttatcaatctggtccgtgaagaactcccaattgtttgcttctccactcctggatctttgtctgctagacgcattgtgctgaaaacttgagacagtctggccttgttagcacaggtggccacagaaagctgaaactgacattcttaagtgtgactgcactatctaacggcctctccctcatctgttatgaaattatcccgatattctgacttccctcattagtcaattcttacttgttctagttcctcttgcccaactctacctctccattacctgtttattactaaacccgccggtgtgcagcatttccagagtcctagtaatccgcaaagaagcgggaaggcgcgggctctggctgcaagggtcgccgcgtaacagtcaccgagaagcactgtagacaacgacgaaaatgcactcgggggcctcggacgcccnnnnnnnnnnnnnggcccccgccactcagcagacctgcacacctacctgttctccaaaggtatcggagcggggccgttacactcacgtgatcgacagagctttgttttcccaggcctgggagtgcagcagcccggccagagcagagctgcccggcgccggctgccaggccagcgaatgcaaggtgggagtggaggcgggcagggctgtggctccctccccaggacgcgggtgcagcctcccggagggaccgtgctccggaaccactgctagcgccaggtccgggatagccgggaaggcggggcgacccggagcgccgtcccggcccacctgggacccacttggacgggagcggagtaaaggcgagtgtacgttcaaacactccatcaggaccccagacactccagagaacgtccgcctaacgcgacgcctccccaggtgaagtaatggccttccggccaatgacaatccaaagtgggtggggcttaacggcatggtccaatggaaaccgtgggctgaaaaaaagcggcgcttcgtgacttatggccaatgggctcaggcgagccgcccacaccaggactggccgcggcttgtaggcgggacctcttccgaagcggatttcgcgcgctcagagcaccggtctactattggtggttattatcctctctttgtgggcgctccctgcgtaacccaggccaggggttgggcggagcttccgagtgacgtgaggatctttgtgaccaatcatcagccctctccttccactgggaggcagggcttcgtgtttgcactttcttgctaggatcccgaacccgaggctgcagagctgacggcatcctgcttcctgtcccggaaagcgaagcgactggtttgggaacagggtgctctgatttggagctcctcccatcccataaaagctgggacgctgtctgtgagcaactgtacaaaataacacatgtaacctcccctgggagtcagtcctgacagcttccttgatttaaatgttccatacccccccacacacatccaaaaaagataaaaatatctatggcctccctgtggaattacactgtgactggctgctgataggataagtcacccagttgtttattgacgtttcagacacttgactagattgatttctaccagaaaagtgacattgggtctgtgagataaaactgactaatgtattatcttattacaggaatgtcggattgcacatcctattgtaaaatgtacttactgcagatcagaagtaataagtgactcaaagtattttagcttccatgactcggtggataatgtttagcaatcaatacaagtcatatgttacagcgttttgagaaaatacttttgcttctgaaatttaaaattaagaacttatatacatagtatgagagaacacatttaaaagtcttggtatttttttagaactagacttcagtttgaacatgagaaaataggggataaattgatggaaggaaaatgtacacttttgccaacaatcaaaatacaattatttttaaacttcttaatggaaaatgctaatgaaccagaggaaagagctatagtgttaccagctgccttccaagactgaagtcactgacatttcagtgtgactaggacagatgtctttaacagaaaatcctcttttagaggacacacaagtaagtagctcaagagaacaaattatttttgtatgtgtggaaatcgcagtggggaacagctgactgagaaatgagaggccctgatgcatgaacgtgtgtatttatattggtaaggaaaagcttggaaccagagggaaagacatcaggtcttttgttttcttcccaaaattatacagtaagttggttgcctgtaaacacagtgtttagaggtagagacaggagaattaccacttagagacaaacctggacacatatcctgagaccttgatactcttgtctctaataataatatgaaaattttgtcttgaagagaaataagtttacaaacaactatcctaaaattagtatccatgcctttaagaagtacttgtgaattagtaagtaatctacaaatcttttgactttggccatttattggagatcaacatatgttacttagcctagacagccacataaccctaatcatctgggtgtaatttccttttcagcaaaactaacacaatctgtaagaagtgtgctcagaatgtcaagcaatttggaacagtaagtatgtttttcatttcatgggattattattggccaattatggttctttaggactttcttataaaacaatccagtgtctgtacttaagtctctcaacatagcaaaatagctcatggggaagaaaatctatatagtctcagatgggaaaatgaaaacaaattcaaaacaactgcatgcttacctgttatgtagtgaatttcaatgtgcattttgtgaaactatttcttaaagacacaattatagcaaattccttaatgtggtgagcttttatttacaatgttaacataatcaaacttttccctggtttctgcaactttttatatggcagtacagttcatgtgttcaaaactaatgacagtatcctggtacaaattggcccacatgtatgttgtagatgttaacataataatactgtttatgataggtcaaaaaaaaaagatatttgcagtatgcatttactgtgacaactacctacatgcagtgaaattctttttagttgaataaatgatacaacagttaagccagctagcatatcacaagttcatttcctcaaattatagagtcatgagacttttctgtgagtaactatctaacctcataagcaaattctgtgttatttaagtcctgagtgtgtttctcacaatggtcagattttttgagcatgcacagttgagctttctgactgtcgtaataaatgttagttgaatgaataggcccatatgtgactttgaacatgtatttggcaaaaacagatgtttttaacttaactttccttcattaactctgcaaataactaatactggatgtgtcttatataacaaagttttaaatgtctcaatgaaactgtttttattttgcagcccaagccttgtcaatactgtaacataattgcagcatttattggtaccaagtgtcagcgttgtacaaattcagaaaaaaaatatggaccacctcagacctgtgaacagtgcaaacagcaatgtgcttttgatcggaaggaggaaggaagaagaaaagtacgttttatttgttaagacttcttctagaaataaaataccagacaacttggcaattactatcagtatacctctaagacatttgtttctgatacctgaaagcggaagtggaagaatatatagcatatctgtctttgcaccatgcatggatttgtgttgatatgttaggatgactgcactttaaaaatcagttgtgctgattgtactgtatgcctgttgtcccagctccttaagggtgaagctggagggtcatttgaaccaaggaattcaagatcaacctagactgtctcaagactttttaattactctgtgatagctattctgcactgtgtattccccagttcagttttgcagtaaatcctttcacttacacccttttgctggttacttaaaaatgttggtgtgaaaaaaatacccatattagttcataaaatttgaagttagtatttttcttttgtttactctcatgtttggaaccgatgtttctctctgcctacagtgacttaattactaggtatacatgtgtcattcctctgctgaccagcactcacacagacttcctgttgtctgttcatctcagttgctttgggggatgactgtctctttgaggggcttacccagatcccgaagtactgtatacacctccagcacttcctctgtgcaatgaaatgaaatgaaatgaaagaaggcagaaactatactttaattttcaaaagaaggcacttctctcccctggactctcatgattgagcctcattgtttgcagttgtgacagtctataaagttgccagactagtgaactgtggcttgtaagggaaatggaggattaagttcctgcctataatcgtaacatgcttgtcagttcaccattacattagtgatttttgtgtctgttaagatagcttgtgtaaatttaattgaatacatggccaggatcagtaataatagttgaacaaatcttaaccaacatgtttttccataaggatcatcatagccttttttaaaactaaaaatggcagtactaaatggcctgtgggaagaacagttgttgacagtgtgagaggagaagcatggaagagtatcaccacctcattctgcgatagttggggctgtgacatctgttggcatgagttttccactgctctgaatgtctgtaaataggattttagacttagaaatcaatacacaaatctacagataaataaactctgaagataatgagaattgattgttacttggactctgtttttgtttaagtcagtacttaactattgtggaaagtactctatcattttggtaattacggagagactaaaacatttatgctagagttttaaaaaatggtcagccatttgtactcctttttaaaattttttttatctttatgtctataaatgttttgcgtgcatttatgaatatacactgtgtgcttgtctgatgcccatagaagtcagaagaaggtgttcagtgccctggaactggagttggaggtggttgtgagtcaccatgtgcgtgctgagaactgaacccgggtcctgcaagagcaaacagtgctcttaactcttgagccatttttctagcccctgttgtagttattttacagaaataataaagatagtgtctcaaaattaaaggactttaacaatgctggaggtctataaatcaaatcttctagccagttttataatcctcttggcaatattatcacaagtgtcaaatgtcttaattttagaatctgcatattacattcatattctacaatttcataagaatcacagaatgttgcacacatgatgtgaagtataatctcaaattgagtctgcttgctgggctcactttctagtttacaggtgcacttatacagatactttctttaaaggtggatggaaagttactgtgctggctctgtaccttatcatataagagagttttacagaagacaaaagaacagaggaagagtttggggtcttcacattccaattcttcgtcttcatctctcactgagaaagaccagcaccattcaaaacaccatcaccaccaccatcaccaccaccatcgccacagtagtggccaccacaagtaagcactttgaaatcctttgttaaaacccttcatgcattgctaatgatctttgcacagatatctacttcagtgtagtgataaagggctaggccagtttctgttgcacttggtgagctgctttagtatctggctgtactgtgaaaaatttccacacaatatatttggtgtttatgaaaataatgaagaatttatctataaaatcatgtgtgaaatcaagatatgtcagcattaattggtgtttcaattatgccagttaacaaaagcttccattttaaaaataattttagggttttatgtttataaactttgtccattttttaatcttaggggtgtgtgcataccaccacagacttagaggttagaggacagtgttgtagaatcagttctttactccaccttatggagcttcagagatgaagcttaagtggaaggcttcatggcaagcccatcccttgttacagcttagctaacttgccgtcccagtataggaagtttgtttcatttgccatgcctttatcttaataaaatcatacttaaagcatccaggcagagattagaacagattctaaaatcctttgtgacaatgatagaaacattttattttcttcctttgtagtaggaattgaacctaggtcctatgttctaagtacaggctctaccattgagctacatgcccagcccctgtagaagcattgttaaccttgaaggttccaaagcgtactatgagtactttttttattttgttggttgttggtgttttttttaaacatcggtatagttgtaatgctattcaaataaaacatcttaatttttaaagtgatttcaggtagggagaaattatggaatagtaataattgtgtgtattaagagggtctgtttaaatatagttttagttatagaaaatcaacattaaaacagatttacatgtaaatgaaaatctcaaaaaaaaaaaaaaggatacaatgaacacagtgttttttctctaaattttactatgtatctttagaatttcagatttttttggggggggggttggttttttgagacagggtttctctgtgtagctttggagcctatcctggcactccctctggagaccaggctggcctcgaactcacagagatccttctgcctctgcctcccgagtgctgggattaaaggtgtgtgccaccaacgcccggctcagatcgttatttaaaatacgattttgttgctgtttcttttttttgagacagggtttctctgtgtatccctggctatcctctcgaactcacagagatttgcctgcctctgcctctagtgctagaattaaaggcatgtgccaccaccgcctggctaaaatatgattttatatataggaaacaaatgactgccacattttgcaccacaaaagttttagcttaattgccaccaaatacctcttagattgtgaagattcattgaggctttagcatatactactaccatgttgtagtgtttcctggggtgacagcggtaaactgctatagttttaaaaacatttatggcctttatatcaaagtaacccaaggaacaaaggaacacaggccttgattctgtttcttgctttaagaagaatgacaactgtgtaccataagtcctacttctgagtctctagaatgtattcttccctggctgtctttccagggttaattttcctagcatgatgggaaagaacaagatacagaattaggtggcagtcatctaatcttaaggatgacctcctaatggaaaagggaaaaagacaatgctgactttcaatttttcactcttttgggggatagatacattaattccttgttactcacaaaagatctgttcaagttctttggaaaccaaagtccaaagtgctccagtctcttccatgatgtggtccggtgtttgcatggcctatgccttcttatgcactataaatggtctgtaaattagttaacaatacctaacatggtagatatgtccataactcattgtttctgattcatagataatgtagttgttgttgatattacgataaatggaaaggaagtcatactattataggtgaaatcatttgttttaatgaaattttctaatggattgtgacttttatatacagtactaacaaagaaaagcctatagacttcagagaggctccttagggaaactaggaaaaaaaaataaaagaaataagctatttcctggttctgcttgacacatggttcttagcagcgtgagttatgtgaaggagcttatttgcatttaggataaacagatagatgcagacttctatatggaatggccagggcagttgatgtcaacattcctagattcttacatgatcctgctgtgctcatgtactccaaacctgagtataattttaaattgagttattggaaatcctaaaaagaaattgcaatttaccattgtacattatctttaaaaacaaattgaagctggctaatgttcatttgattagagtttatcctattaaaatgtgatttgttccttatatcagatgatctggcttctgtgaagaaaagatttataacacagtttgagtctgtggggaaagaatattaaaggtagctgttatcagatgttactcgtgtgtttttcagaatcagcagtctaagtcctgagcaggagcaaggactgtggaaacagaggtaagtgtgctggtgtacagtgtgtgtgtttgaagtgtgcttgtgtaaatcagcctctctaatgtggttatttaggttgaaaaaactagtgatgttcagtggtatttgagaggaagagtagcttataacttaatgcctgttttattctaatcatttttgctaatgtttgctttcagccataaatcctctgcagcaattcagaatgaaactccaaagaaaaagcccaaattggaatctaagccatctaatggagataggtaaaaatgaatgtctttagtgctatgaaaattgaacttaattgaatagttctggctaattctgaattattactacatattttatctgagaatagaaacatgggtctcacacaccaacttctttaagtcacctgggagagtaaaatatacataatcagttaagaaaattttaattttggcaataagaaagtggcactgaactatgttgttataactggggaataaatttgggttttgaggaaagaacaaatctcaatagagaacattgtaattgttcctcaagaaaaaaaaaaaaaacaaatctgattgtagtatttttaaattgacctgcttagaaatgttttgatttaaaatatgagtgtgactttgttttagttcattagccaagtttgctgatgttactgtacaaattggctgcctattgctttacactagaagtattgaccccctaaaagctaatactgaattatatttctgcaggtgtatgtaatgtgtgccattagtaaggtaatttgccagttgcatccatttctgtcaggtacatatttttttgcattagccttaaggatgtttgtggaattgtctaatttatgcaatttgaacatctgcacattttccttctactttgtgtaactctgttttacttttttctttttagtagctctataaatcagtcagcagatagtgggggaacagacaattttgtccttataagtcaactgaaagaagaagtgatgtcacttaaacgtctcttacagcaaagagaccagaccattttagagaaagataaaaaggtgagaatatagctcagtgaagcctggtaagatttgcatcttggctttaattaacccttgcaagttttctttaaatgtttggtagtgtttgtaatgtatgactcttacaagacaaactgcagaagcccaaattgggtctgaaacatctagtgaagataggtaaaagtggtgtataacagtaacctttaaatgttagttttcagttagcatgtaaagttaaaacaggtttaacatcttaattttaaaatgggatgtaaatggaatatgtaaattattgtggtttcaaaagtaattgaaaaaagcatatatatatatatatgttggtcatgtctctgtcaatcagctggtgagagggaataatattctgatgtcctgtggcagtgattagcactaggtatctaagaacatattgtaggaacataaaatcaggtgtacttcctgactttagtatttagccacattcaggatgaagtctctattctggctgtttctgtgtggccttaagtagaacatgttcattagttgaggccttggtttctaaaattgtttttactgattcctaatagtcattagttgtttttgtttgtttggttttggtttttttgtttgtttttccagaaagggtttctctgtagctttgtagcctgtcctggtactcactctgtagaccagactgccctccagctcctgtagatccacctgcctgtgcctcccacatactgggattaaaggtgtgtgccactattgcccgatcttagttgtagttttaaaagatgaaagaaatgaacacaaagaagacctagactctaaatggtgcttgccatcagcaaaaaaggggagttcaaatgtaaacagttccagtaggatataaatagtgtttgagccctcatcccggagctccagtgtctcagttcccacattttgatggttgatgccctttattttactgctctatttacttattttttgaagagtgtgtcactgtgtgcctctggctgttctggaactcaagattcccctgcctcattgtcctaagtgctgagattaaagacatgcccaacctctttattttagtatataccacaatttgagtaaattaagtatgtaaaaattggcgttggcgtgtaaggtaaaattggatagttgtagttgtctttcttttagggttccttatgagtagctgaaactttaaattaaaatttgcttttatggaagtgtgtacattaagctttaacttactatgtaaagccaactatgtctacatttaccttgaaccaaagttaataaaatgccatgtttcctgcaaattagcaataattccaaactgggcattaacaaattgtatttcggtgtttctcgtcctccctaaaacagcagtcctgttgtggtaaccctcaaccacaaaattattttcattgctagttcatatctgtaattttgctacagatatgaattataatgtaaatgtctgctctttccagtagtcttaggtgacccttttgagagagttattcagcccaccaagtggttgcaacctacaggttgagaacctccattgtagcctctctatccctagcatcaccattgtgtttaggtagtttattggcatttcatgcgtgagtgtttcctttaaaaaccaaaaacactagcaagtttataattaaagttatagtaaggaaaataattatgtatctaaaattaactacacacttgtcgttttttctttataattctaaaaggatgaagttagtttcctgtccctgtttgagctattgagtgcttttcaaagacaggcactgtactaggtcagatgctgtctctaccttccagcagttcagtttggaagcaaatcatggttcagcgactagaatagttatcaaagttgatggtaagaattggcatttcacaacacaagcctgtttataacatacaacattgccccaaactcccaatttttctcttagcttttgcatctttttatatactaggtactttgctggagagatagctcagctgttaaattaaggctaggctcacaaccaaaaatacatactagatacttggtaattagtacaaactctgaaagcttacataatggcagaaacctgaatactgttaatagcagcgtaggttgtaatttgaagtcataaaacactacactttttgttggtgaccttatctatgaaagcattgtcttgtggtctccagttctctacaccagtgaattttcccttaattttcacttgtctaatttagttcagattttacagaagttacttatctacatgccacattgattgtatttctgtgctggtaggtaaatatagtgtaatggctttgtgtacataatgctgggtacaaatgaacaattataaacactgttgcccttggttgataactgttgtgtacatttgcacattatgaagccttttccttccatcattgaaaaatggttctacctggaaacctgtttacttaatgtgaagtgtattcagttgaaacactctccaggatgcgagccattggcttgctcattgtgaaagtgaccagttaatccaaagtcaccttctcaaagatgatccttaccattaaaaccctgacaataggaggaaaactactctgtttcacagaatatgcagcttctaccacttctcccacctgtctagcaagcgtgtgcctgttgtgaagagtacttaaatggtgtgatatctgagagtatacatgcctgtatatgaatgccttttttttttttttttcagttaactgaactgaaggcagactttcaataccaagaatcaaatttgagaactaagatgaacagtatggaaaaagctcacaaagaaactgtggaacaacttcaggtaaatggtgttatttgtgtgagctggagagttgggctggagagttaaatctgtattgtatttcttagaagagttggtattattactcctatttccagttttaattccggctttataaagttttgaaaaggtgattcacttttaatctagtgtccacttgactgttgagctaaggtcagagtgtcatttacagtgctatggtgaaaatatggtctatacttagatactcattcttcccatttcctttaggataactggaagggagtagaaaaaggaaaccagttctcaaagcctgtgaccaaagggcctttgtgctgtgtgcaagtgctgcaaattaagatggtctttaactgtgtactatctgaaagtgtattaggttcactattgtatgtaatatagatatatagtacacagtgtgttctttaatcatacagaattgaacagtgaagctgagagtcaccaccatctcaaagagggtagatattgagggtcagcatagaaaggcttattcccttaaacttgtttttatctgttttacaaattggggcatgaaactatactacattgatttcatgttgtacagtttataaattgtgatatttatagagttaatctttgagtaacaggcttatggttgttttttcgtttatttttgctattctagatcaaaccttggttttcacaagtgctctgccctaagctcagcccctaggttaaacaatcttaagcatacagatgatgtcatattcagccttcagacatgaagggagagtacagctttaaaaaggatgtgtgaatattgctttatttgtatgttttgttttctgctgaattttttttaacacccatggatattttctgttcctatcatggtttggtgtgcctcataattgagtaggatttacgtactcactggagtccagatgtatatttcccagtctttaacctgtttttactagtgacaggaaattgaaaagggtcctctgtagaaataggggtatagggaatttgttcatgggtggtgatttttggaaatggacttgcccttcctcctcagagattgcctgttgtgaattaggcctcttgtacattagttaactgtttttagccaccagccattattttgttttattcttattaagttatattgaatgtttacctgggatataatcagccttctgtaactgaagtactgcagtaaatacttctaagttatagaataaccatgataacggtaagtacttcctaggtttcatttaacctggtatgtactttccactgttccaaagaacaattccttttgttaaaggcagttgcaaaagaaccatttttactttagcctggtaggtgtctttagcatacttcctatgctaccactatggcaaacattcacacagaagggagggtatagtcagtgtgttttgtatatgctgttcgtatttgctccataacaagagctgaattatgagctattcccatcttacaggtgaaactggttatgtaattagagagatgtagatactcacattgtgtgccttagattttcctgtccattcccctatcctgcatcagctcacacctcaggttattcgattatctcaatgtcctagttatcagttgcttccctgtacactgagtttctgctagagacactcttgacagctcagcgtagtccccacctacttgctttagtagcggttactgaggtgagtatacttagttaattattttcttatctgtttcatttgttttgtttttgaggtagtgcttcactgtataggccagtttggtcttcttcggcctccaaatacttggatttttccctttacttctgcctgtttttcttaatcttttatagtatacaaaagttaatgattaacaaaatttatcttgccctaatagctctttaagtattttaaactatcaagcctaggaatacagactgaaattcatcccccacatggtataaaatcttcctaagtactaataatgtgaagtaaaaactgttctttagtaagaaaagctaaaaggggaagggaaatgaccttcgaatgctattgtgtacagccactgcattgtggctgtgtgattagctctttgagctacgtgagtctcttgtttggggtaaggtgtcctccagttaaatgtgggtaagtagataggcagagtctgtgtagttactcattgaacactcttcctttgtttaggctaacattttaaatgtttctgacttaaatattagaataatttcattggtgtctataaagtcggtattagaataaaatttcaatatgtgtacatttaaatactgtattgcaacttatattgcagctacttaaaataagactatttttcttaaagcctttgtcttaatataatttatcaacaagttactgatgtcactaggagaataaatctataaataatactgaaaattgctgcaaaagtattaaagagagagactgctttcaagaccctttttgttctaagaatgacagttcagtttcccttgatgactgaaagtggggttttaattgttgggtaagccagtgttattagtaactgcctctgctgactgggcctatgcccttcattgctcctggctctgaaattggttttttgagtttcccgttttttagccagtaggtctgttgtggttaaataataaatagctgcactgttactatttatatctggcagtgactaggatttgtcagagagtaacagtttaagctttaagagtagtggagacatcctttgtgtgtctgaggatttgctttaggattatgttgtttcttagtagtgcccaagctccataatgtttctattggctagaaacttcagaactgtcctgataatcatctgtgtacaggaggaactttcattatctaagttaccagggagtgcataaagtagcacagaccagataatgagaaaaaaaactccatgaaggtcctacctgtagattctcccgagaacaccaatgttaccaaacagcacccctgcagtgatgaccaagcattgttgtgtcaggtgacacaacagcaacaacaaatgggtttttatgaaattataccagtattgttaggaatttgcttagatgatgctaaagtcatcaaatgaaggggccattagggactgtaataaacagtaaaggatagcatcttattgccaagtcttccaactagagtttggtttccaggactcacatggtgggagcagggaatgaaccctaccacctctcctttattttcacatgcatattgtggcctcgaatacacacatatgtgcacacaagatgagtagtaattgttttttcaaaaagggcctttggcaaatgatagaatgattttcacaaatagttttatactttttctgcattaacggtaaatagcaaatggaagacttcattcagtttgctggaaaattctccagaataaacatttgatttattctttgatgctttcagttgtagaatagcatgcatgtcagtagctttcatgctttaaagaaccaaacgttttttctgatcttaaatttgaatcctctgggagagaaccgcgtgccatttcttgtataatgaactgtatttttggacaaattatgttgacatttgccaggagctctttctacctatccttaaaaagattaaatatactaactcttggatctcttagtgtttcattgataaaaaaattttatacaaatgaagaagtagtattaagtagcagttttcagcatgacttaatacttcaaatgttttaaaccttaaatttttgtctctcacaggccaaaaacagagaactactcaaacaggttgcagccttgtcaaagggtaaaaagtttgacaagagtggaagcgtgctaacgtctccttgaaaaggtctcttgtttagcatttctgcttgacagtgtgtatttgaggcgtcctgtgaagcccttaaattctgtgcagtggaaaaatatttttacatgccaagtaaattggtgtgtttcctattcacttttgtaattgacacacagcattttttaagttgtaaacatacagataaaacttcagctggtttggagtgacttcttaattctttgatacctagaactttttctagcaatagtattaaaggttgtggagtgcacgtgtgtgcactgtatacaatgcaacatgcaataatggagtggttggaagaacagcagcagggggtttgtgtcttgcttttgtttaacatgatgctgatttcaaataaatagttttcaatttagaaatgcaaaacttttaaacaaggaaaatggtgaacactgatttttttggggaattgtatttttacttcgcatcaacatgaatttagagaatcatggtgcttttattaaaagagcttcagagtatatgtgaatatgtttttaaaagttacatcactaacattagtttagtaatctaacatttcattgctgttataggattgatgtttactgtacagcatccaaggtaaaatgtgtttttgttttgtaaaaactgtagatttttacttacaagtgccttttgccacctaatgtttttatttataggaatgctgattttttgtacatatggtttgtttaaaaatcatgttaataagtgtttgtatataagtgcatatgtacagaacccaatttcaaaaagaaatcaattagtaacatgcaagattgcatattaagaattaactgataatgcatatagacttaagtgattttgtgatttgattctgtatcataagggaagctgttggtcattgagttcatttaattatgttgaaatactttcctaaagatttaattttaactccattttgatagagtgattttatttttatgttgtgtgacttcatgtttatattttgtgagttacatgttttgctttatttttatataaaatttctttaaaatttataatgtttctataacggtccatatatctgctttttttataatgtgttgctaagttaatatttatgtacaccatacttactttgtaaacttattacaaatctggaaaattaaataactttataatcaaatccatgcttgtgtctgaataattgaaatctgtaagattcagacactacttataagtaatttgtttcaaagtataaaattgtctataaagatttcagtagtatggaatagagtctgtgaaattacaaattagtttctgaaccctagtggttttcagccagtaactgaaattggtctgcttaatgttagttctggtttcaaggtgaattttaaaactaaaggcattgctagaaacaacatgtggcttcttttagaaatacacatttaaacttgtttgaatcagtctgaagggtttgtttttagataagtgtttatatggtcttcatatcaaagattagtgtttttaagcgtacataattgtaacaattatttttttcagttattcaagttttagtaaacttcccatagttgtttactccaagtaaaagcaaatctagcaatttgcaaacacataattttcaagtaacagtaagattgagttagatttggaaaaagtttgacaagtctgttgttatgacaccctcacaaataatgttaatttattgttctcaatcacagtagataatgccttaatgtggatactaatatttggaggatttgtgcattcataaagttgtcgttactttgctttaagttttgtaacgattcatattacagtttcctggccatttttcaaaccacagtagtcaaaattctaagtgaactacaatagttcttacaccttgttggagatgatagaaatgaaatccccttttcccctttaactaacatggaaattgagaatcagtataaaatagtgaagctttgtaaagtgaaaggctaaaacctaaatttaggggcctcacagtattcagtcctaataagacaaactctttattctgtgaccttattttataacttaattgttttgcaattgtataaattagtaattgagtcccagtcccagatatgtagtgtattggcctaatgagttgataccatttaaatgtggacctgtccagaaatactatggtgtgctgtattgtacttttagcctgtttgctgcagttagcatatcccagtgagggtcatttggactccagtttatcatgtattaatagcctgtgaatattatggtcatctttaagagtgtattggtctaaatattcattttacaatgaacctgttaatgctggtcacatgtataaattaacaaaatattgtacctgtacacatctgactgttgacattttgtacttttttctaaacccaatatttcacaataaaaatatgtcaaaagctttgtgttaattctactatagtgatttactctaatttggtgtttaacaaatgcatctacaaagtcccagttgtccagaagggtgccatatttccaggtgtaggaatctcattgtgtacattttggggcgaggcattattacacattccctaaggttcatggttttccaaggaagtcctaacacaatagatatgggggaaatgactgggactgggcattagaagaatatcctatctggttcattcttccttagtgagatgggcaagccaatctgaatatagcagtttaacactacatagaaaataaaagcaatgtattgtattgtgtttatgtacgtaattaaacgacagagaagcacaaaaccagagcagtaattggtcaccattgacaaatggttagggactaattcattattttgaacactggtattattttcaaccgctagacagatagactaaaggcagtttttcttgggaggaaaatccacttaataataaataataatccatttatgccaaaacttaagatggaataatgatctcttgtttttgcaacttgcagtagagagagcacattgttacagttgagtgttctgatggagaaacactccctataaagagttgcccagttagtagatttagtttctttcaaattagaaggaaatagaaccaaggtcagattgaaaggcacaccaaaaggatgtgattggcactgttatttcttcataaattgcaaggggatgaaagcaatagaaatggaacctgaggcactcaaataaccaatcatatttggtggccctcatttttaatgtgaatcaaatttttaattttttgaagaaatttatacaatagaggaattttcacactggttattttgtaatgtgattgaagaatcattttctggtgtgataatggttataattactctttacaagtctttgtggcaccttctaagttaaatgcttggtttttgattcatctcatggagagaaatggattggaatataaagaaagcagaattggttgagctgttgcttttaggtgagtgatgtgtaaattactgtcccaattttgtgatccagctttttgtaaaaacaaaacaagcaagcaaaaacagaaagaaaaaaagaaaagggcaatgcaaacaggacattgtgtggcctgtaatcctattacttgagagactgaggcaggagagtcacaagattgaggtcagcctggccagtgtgatgagacatctcgaaatacaaaacaccgtgtcagcgatccctaccaaattatgctctgttcactgagaaggaaaacatgtgagcagcattaagttcaaggaagaaaggaaaaataatgtcgccaccactccaggttgtccctggagatatccatggtttgcttctgctcattttcttccagcaatgtctgagtaatggcagttgcgatgctgctgtgtaggtttggctcctgtttctacctcctaacaaacggagtcagtgctacaaaacaacatagggctggaactggagctcattgatggagcacatctaatcattttcatgagccatttgccagtcattgcttttggcgatctgcaagcaccagattttttaagggagcaaaggatcgagttgctgagggaagaacaaaaatgttctgtgactgccaagttcagggtcccaacttgccacaacttcctgtgtctccttccttgttcctgttcttagtctgtctctcccccccccccccccttaaaattttaaaacaatactcatttcctagtttgttaaatgttacaatgttacctgtaagtctagtgttgcataaatatataatagcagaccagatccaccttcatttccacactgtatttcagtacaacttggcaactccattgagatgtctaaccctctttaacatatcttactaatttacctttttttatttactgtgtgtgtatgtgttctcacgcacacatggacacctatgccacagtgtacttgtggaggtgagagtactacttgcaggagtcagttctctcctactgtgtgagtcttgagattcgaactcggacccatcaagcttagtgacaagcacctttacctgctgatccatcttacccatccaagcctcttatatttttgatgattagggcaggtgagattggagaggggctgctcctgggatcaagtgaataaaggtttgtctaccttctacagtgcacaagcctacacaaccaagagctgttagtaaaggtttctgcaagcctgcacaaccaagagctgttagtaaaggtggctgcaagctcaggttgagctcacctgacctagtgcaccttatattggtggattattaacactgattctcacagtttcccagacaaagtccaagatgaaggcactggctggtttcacacttgtggagaggacttactcttagatgttagcttctcatcacatcctcagtggaaagtcaaggcagctggcttctcgtgtctaaggcattatattccctcgctttctactgtcaacagttggtgatccagcagaggaattttagagagaatgaatacaaactcctctgagcccgaaaatggatttacatgttggctctccaatagcctaaagaccttgactttaaaacaacctatacaaagctagaaatcattgactcataaataactatccctctgtcttaaaattctgtgcatactaagaggaaatgaatcttggtaagattttaacctttttgttaaaattcctaccaatgtccacaagagggagggctctgctacgaaacagtactgcagcaggtacctagccagcccagccctagaaccctcagaggctagagccagcctcttagctgtgagcctagcctttaggctgagccatcaacagcactctagttacttatagttgaatgttttgttatatgtgaatacatttcacaagcaatcagtccatcatacctgttcttattgcacttgagggcaacacagtagattaggagatagtagtactgaattagaagctgtttacctccaacaaagacagtgggcatctaggtagtggtggcacagatagtgagagcatcactgcttttctgtggatgcagcacggtgctatatgacacactatacaacttgtgcagccatgaaagctcccctatgccttcagttctcaccaagtcagaagtggcatgctttgagttaagctctcacatgcttaagatcagcagtttctcaacctatggggctcagctggcaggggtcgaatatcagatacttaaattatcattcataacagtagcaaaattacaattaggaagtagcaatgagataattttatggttggagtcaccacaacatgaggaactgtattaaagggccacagcattaggaaggttgagaaccactgctttagatggtccttaagggtagttaacatgatctgtgtatttcaggtgacagactttttccatatctgatgaatgaagctatacattgctaataggacaatctgggaaaccaggctggctattttagcttctgtcaaattattcttgtattgataattttcagtgcagctcaaaaaaattgtatttcctttgccgtgtgaaaacctgacaaattttggtgtaggcagacttttcttcccaccaaccggttcccacataacaacacagaaacttcttagtaatcgtaaatgcccagctagctcagttggtagaacatgagacccctaatctcagggttgtgggtttgagcccacattgggcttcatttgtaggtgaagggtttttctggtcaggactgatggatccccattaaatgcacaaagacttaattataaatgctctaccaatagttctggcttgttactgaagggaccagctccccatatcagcagccataacagccaaacacgtgcttgtctgaccttgtcttagtcactaaggtcagatgcttgccccttttggcagccatagcaaccgcacatgtgcttgtctgaccttgtcttagtcactaagaggtcagacacctgcctcatggcaaggaaccaatcagaagttagctggtggtgctatgctttatggctctgggtgtgctttacggacaagcacacatcaatgacacacagagcatagcaaccaccctgggagggcctatgggccataacaaccagttgaccaatcaacacagggcaagccctccaagcctggagccacaccaatcctgagcctgtgtgtacccctagacagtccccttacgctgccctacaagaactctatgtagacacttccctagctgtctttcctagccatccgccatggtggatggatggaaggcccgagctaacatggggttagctcattaaacaactataataaagcctcatgctgtttgcatcaagctttcgactctgcatggtgattggggtggcagcggtcctgggctgagatcctggaggcctgagctttccagagatcttacagttactagttaactcttatattttaaattaacacatatttcctatctatcctctgccacatggcggtaccttctttcaaagtagcatgttcatcttgcttccctctttgtctcttgagactcccaagactacacccttgttcccagcctcctctcttatgtcttgctgtccccccatacatcctgcttagctataggccagtcacctctttttattaaaccaatcagagggtgccttgacaaagacacagcatacaaaaagattattccataacattttgggcaggataaagtgtgtcagttttctttgtcaaatgaaatttgacaaatttcaatttttgagtgaatatccaatgttatggaagtactggaccaaatgttttactgtattagtaccctgaataataagttgcaaattctaaaaaataatgagtgaaacccaaaataagggggtggaacagatctgaaaatggagctatggtactttgctatctagtttctaatgtaccttgtgcctcagtcatgactttctgccttatgttgttatatgtatgtacatattgaattcatattcctaattccagtgttagtttatctcttcaaacgcttccagaggtttcttagcccagcacctagcatcctattaggtgggtggctgcctacagccatttgttgttgtagaggccatggtccttttcttctccagctaccatctgcctgctcttttcagtttacnnnnnnnnnnnnnnnnnnnnnnnnnnnnnnnnnnnnnntctttctagctcagcttgtcacaaagcagggagacaagcagtcgagttttactttaagacagttcaggttgttggccttgaactcaatatgtaggggcaaaagtgacattaaactccaaatcgcccatctccaccccctgagcaccagttacaggcatcgaccaccatgcttggcttcacctgaaagctttactctctggacttagcagatgtctagagctgacttcctgaaatgagacacgaggctctgtcaaagctggggcttttccacattctctggaatcccctctaaagtcactgggaactttatacctcatggtctgtgatctgagcatgccacactcccatggcccttcttctggcctgggagctcagcttggtttttgagtcctgaatgaagacttttgctggattctcttgcagcttacttcacacccatccacccagagcagtcttgagcaaaaaataggacatcttcaagccagctgggcctcatttccaccactaaaaacccgcctcacatcttagctttgtgttctttcagtcagttctatgaagaagaaatcgaaaattccagtattagctgagagaattcaactgactgacctggcctaagtatcagttgcagatccattcagttgtggctcgggcacagactccctgcagtctgagtgtggccaccagatctctacacaatgggaaaggcagtacacatgagcagtcacggacagtgctggcatggccactgtgggtaccacaagtgatgcatcaacttctaatactttaacttgttttgagcaaatgttagaataattttttttcttcacgaacttccaaagtacactataggatatatttatactataaagacaaaatgtgttatattagtttatcactctacttcacgggtgcatgtaccctctcatgaagtcatattagcaatctgtagatgctgttgtgcaccagtttcctccagactgtaagattccatcctgagggaagctccttaggcaagaaagtaaatagctccaggaagtccctgaaactgactagattcactgggtccctcccttccctccctcccttcctcccttcccttcctccctccctcccctcccttcctcccttcccttcctccttccctcctttcctcccaccctcccttccctccctctctccttccctccaaaaagatagtgactctcaacctatgggtcgaaaccctttaggggttgagtctcctgagaccattggggaccctagatatttacattaaaattaacactagcaaaactacagtcatgaaaataatcttatggttggggtcacgacaccacgaggaactgtattaaagctttgcagcattaagaatgttgagagccactgctctaagtctaagacccagatgagctagctacctgaaagaagcagaaaccagctgagctccctggaagaagtttagaccagagtcacttggaagagacactctccaacctgttgagccacctgcaggctgtgcagtgtgctccatgtcccagctttgtgagctgtcacccatgctggggtaggctttggggacatggctgtcttagagtcatttctgctcttgtaagtaacccttcacccacattcctgtaagtagatcctccccccccccagagtcattgtttaccaagtttgactttgatggtatccatcctttggtctgtcatgggccccctatctggggtgagtagatgcgcatctctgcaggaaatgttttgccatccaatgccatgttctgttaaatgttagtcaacatcctggtgtgtcttctactgagcaggtggcattttgagggagtaataggcaatttagcaaataaagcagtggaaacatgatgtaatctgacggaccagtagatctgacatttgtcaatctgtggctgtctgactttcagtagcagagcaggcacagtttgaaagtgtggttttagtttatcaatgttgtgaactcacaatgcagataatgtaacaaaggaaagtgcactttaaagtttgaaatctacatacaaaacaacattaagaaatttaaaaaacagtgctggagagatggctcaatagctcagtgtccttgcaggtcctagggaggacaagagttcagctccaagcacacactctgggcaggtcactcacctgtcactactgctgcaggagatctgatacccttttctcacctcctctggcatctgcatggaggtacacatgtatacattcagacagacacacagacaaaataaaaaataaataaacccttttttaaaattaaaattagcaacctcgccataccaaagtgatttcaaatttctgtacttaggatgtacttccctggatggacatcctgtccagctttgccatccacagttccttcagagctgaacttcagttgtgacaggcaatagaaagtcactgcaatgacaaaatgggccagtacctaataaggcatgcagattttttttttggtacttaataagtagcagtagaactgaggataggatagtgtttatgttgagcattcctgtctcagccttccagggacatgcccatccactcacccactatccactggttgctggaatgtggaaactaactaatgacttttgagtgttgatattaatcttctttgtatgtgtttctactcccatttttattttacagcatggatcagaagtcaaccccttttctctacaatgcctgggattgaacccaggactttatacatactagtccaacattctaccaggaagttgcagaccaggcatgaaaaagtagtctttctgaatttgcaaaagacattactggctctctcacatatccgaatgccctgtgttcgtactggttaagaaaatgtcagcacactgcaaacccaatgctcaccagtggtggggtgtgaaatatgtcagatatcattagcagattcaaagagttttacaagtgggaagcagcatgagttcaccaccacagaagccttgcaagactcagcacccagcattaggaatgaggaccggcccgatcttctgcaacagaagatagctctaaagctacagcaaacaaaacaaagtcagtcgacatcataaaacctcgtgtatggctcaaatgagaggagagcagggagcagaggcatcgtgaaagtcacacacagaacaaagacaggccctctggccaccttcccagatatcatggcagatatgagattctagcaaatattttagaagagagaaaatggatgggtttttgctcagacttagtagagttagaagagctggaacataatgcctgcagaaggcaaagcttcggtgcagcagctgttgcactccacaggaccaaggaaagatgggattgaagcaagagagagagggtgaactgaatgaaagacttaaactttgtgaaactttctgcccatccctatcaaggtaggcatctggaggcttgctaacagaaaaattaagacactctgtaattagtgatgacagacaaggccaaaggtcgagtgagtcagcagactagaaatgggtatggcattacattttacatagagatggtgagatctctaagctcacttatttatctgaactctcagctaaattcagacactcagtgtgttgcattgagtcataggtttgggggaatttaattaggcaaggcaagggctacggtggttataatgcattaccaaattgcaacaaatacaacagcacaaaacaccattttcttgtgctgatggtttcttaggcccatcttcaggccacacacacaaaaactatgtggggacagcttttatctgcttcacaacacctagaggctcaatgggacatcaagagaaaccccaatgatgaaggacagaatcctctagaaacatctttaagcacaggcatagtggctaatgaggtgatgtaaggactgggttcttctgggactgccaattagagttcctgtgtgagttctcttcgtgtaatttgagtttcatgtgatgattgacttgtccagcaaaaagggtagctgcttcatggccacctatgtgtgccatactctgtcacttttgctgttttgtgttggcccaacccttgcaggcacaacagtggcataaacacattatccacggtagatttatagctactggaaatcataagagatgagatcaactatcaggaaggccttctggaaattaaggcagaaagtaaagaaatgcaaatccaggtccactagagttaaagggttactgagaggaaagaaaatattcatgtgaacctgtgctggtccctggggtttctgctataggccctggctacatatgggggcttcatgggggatgcctggggccctaattataggaatggctgagatcaagtgaactttcggagtcctagcaggaaaagctcagtagcccttatttggactctgtcttaagaaaacaacttagttccaggacagctagggctgttacacagagaaaccctgtctggaaaaactaaaagaaggaggaggaggaggaggaggaagaagaagaggaggaggaggaagaggaggaagaagaacaagaacaagaacaagaagaacaagaagaagaaaagaggaagaagagaagaagaagaagaagaagaagaagaagaagaagaagaagaagaagaagaagaagaagaagaaaaagaagaagaagaagaagagaaagaggaaagaaagagaaaaaagaaaaagaaagaaaaagaaagagaaaaagaaagaaaagaaaacaaccagggccagaaacacatatctttaatcccaccctgtgggaggcagaggcagttggatttctgtgagttcaaggcctgactagcctccagccagggctatacagtgagaccctttatggtgatacattatgatttattaaagcttgcccaaggattcagaaagcaaagtcagcctcaggctctagagatcagacagtggtgatgcacacccttaatctcagcagccagaagctaggaggtggtggtagtacacatctttaatcctaggactcaggattaagaggtagacggatctctgtgagtccaaggccactcagatctacacaagactgaatcagtcctaaagagaaacagctcacacaaagatgatctcagcacctgggatcacatgcctttaatgccagcactagagaggtataaaagacaggagcagggtctcagtagtcagtatcaggcattcattctccagccacattgaggataggaagacattgaagtctcaggattctccagccatgctgaggagaggcagcagtttgaggtttagtggagccaggatcacatttcattctgaggtagagtgagagctagtgcccagctgctttgcttttctgatctttagcttgaagtttgaaccccagtatctgtctctgggtcatttgtttattgagtaacaaacaaccctgtcttaaaaaaataaaataatcaaggaagtttaaacactggtggaacagcattggctgtaatagttgaaggacaacaatggtatttttatgtttaaagaatagtttcactttttacaatgagttcttgtgctaggtagggattaactcagttgataaaatgcttgtccagtgtacctgaatccctgtgtgtggtccctccctagtactccatataccaggcctgtgttgcacaccagtaatctcagcactgagatagtagaggcagaagaaccagaagttcaagatcatccacacctacgtagtgagtttgaggccagccttggctacataaggaaaggaaaaagggagttcttttgaagaaacatactaaaatgtctacaaagaaacagagtatttcttggagaagaggaacaaggcatagatgggctagatgttggtaattatggaaaccagtgacagccatatggtgttccttaattattttctctccttctgtgtatgtttgtaactttcacacacacacacacacacaaaaaaaaaaaaaaatttaaggcttgcacacaaacccatacatgcacgtatgtgcatgcagacaggagctaacctccaggcaggattagctgtacttcagagaagtgaaaaatttagaataaatcttcaaatatttgcacttgtccaagtcttttttttttttttttttttttttttttttttttttttttttgtagagaaatgcaaggcctcactgctccacaaggaagaagtgagcctcatatcagtgcctcctggtagtcagcacagcagtggtcttcacactctgatgctctgtttgaagctacataaactccaaatgcacatgtgaacacaagaaaaggcaaatttgggttaagtggtgagtggacttgttttcatctaaagtccccaggtctggagagaggctttgctgtactcacatcagttacatttctccattcttcactgttattcaccctcccaagagctcaggctgactttacctgcagttatctgtcagacctgcttcctggctttggccccacttcttggcaatgacctgagcacagcaaagggactggtgacctagctttacactggcatcctcacaacccacagaacagtgtttaagttagtgcgcattccccatgcctcttctgttatctccagttcacagctggctcaggttatgttgtccatcatcctctagtggaatggttactgcctccaggaaactttcctatgacaggaagaattcatcttcaggcctctgtgttccagtagctaagtctgtctcttttagatgaaagcgtgactactatattttctatcacacatattgtgatgatcacatactgtgatctagttacagatcttgttccttccagggactgtatgctcctgggccactggaccacactcagttcatcaccagggaatatctagcattggtcatgacacaacacaagagtaaagtaaacacttcttgagttaatgaaccaaagcttccacacatatcccttggtgaattacttaaaagagtaaaaacaaacccaaattaaaaacctatacatgcttgctaggtgtaatttatcattctccagaggtcaattagatagacaatatttttaatggtcccttccattgctcttctgctgactggaaggaaagaggagtgttttggttgttattaaaaattcttcaatattattaactacctttctgaagatgaacttgagtccagacctaattaaagtgttccctttaaatgatgggtaaaggggcctccattcctccctgggctggttaggcaatatcttcttctatattaaacaataaaggcagatctgtggtctccagcaagtattttcctaaaagaacaggtgttctcaccttggttaaaaaaaaaaaaaagcaataaaacccgagctagcctccccaccacccctggaatgcagccatccatacactgtgcagtcccgaagggtccttgcactctgaacagatggataattaggcagaatattctactgagagacttttgagaagaaagtgagggattcagaactaggaaacaagaaaggatgatgtggcagcagtggttgctctgtagagttcagaagctcattccttttgaatagaacctcatcaccttagggcttctgctgagggattaaaagggactactctggtctttgaagaggaaggctaagtctttgtggattcatgtgattcttgttttaattggaaagccttttttgcctaaagaataatagtgattaaaacagttctggcattacatttccagatgtaactcagtcactgaggctggacttgctcttcacccagggcactggaaattggacaaatgtgtatgtaatagctttgttcagattttgcacagcagtccaggactaatccccgggaggaaggaaattagcagtatggtggttccagcacctcagctttctgtacttcatgaatggcagtacatcgaggagactttgtcttctctggagaacacagaaggcagaggattgcctcaattggtatgtcagactttgttgactccccaaggaaggacttatccctctaaggagtaaatgggggatgggaaggatgggaggatggggagtgggagaaggggagggagggggaactggggctggtatgttaaatgcaaaataaattttaaaataaaataaaacctgctacacaccccctcatctctgtcattaaacaagagggagccttaaaataattagggttggcatgattttagaggattaatgttgtaacaaattagatgattttttttttctttttttctgttttgatgttgacaacacattgcaaattcttgctgctcatcagtgaccagattcctctactgggtaattgaaagttaataggaatgtctacttgtgtattcatagacattagacattgctttcatctctgtttctctagatgggggattaaatacacactgacattgttgcctatgggtgcctctttgcatcttcagttagccaaggccagtttctgtactagccatgtaaaggtagatggtgaagggaagttatatgtttagattcagaagtggcctgccagccaaatgagggagaattctgaattgtgccttcttgattcaaagtctggtggtcactaggagtgtgtggcacccagcacacactcccacagcaagtatccaaaatttttgtgtgtcttaagaataatttctaaaactacaaaaacattcttaggaggctagggagatggctcagtgggattatagtggaataatcttttttgtacactgtaaagatgtgtctttgccaatgcaccttctgattggtttaataaagagctgaatggccaatagcacaaagagattaggtgggacttctgggcacagagagaaaagaagagatgaatctaggcataagagatacgtcagaggacagggagaggaaagaggaggtgcaatacggaagagaggttaacaagccatgaggcaaaacgtagattaatataaatgggttaatttaagttctaagagctagtgggacaagccaaagctataggctgagctttcataatcaagtctccatgtcattatttggggctgtcagagtaaaagaaagtccaactactggtaataagcctgctctggatgcaggtggactgcattgggtccccagcacccataggaaaagctgggcctgccatctcatgcctctaatcccattgcagggaagagacaggtgatcccaggaactccctggctagcaagcaaagttccagattcagtgagatagcatgcctcagaaaatatagttgagaatgaccgaagcaccaaattttggcctctgttctccacagaagcatgccttgatatgtacacacctgtgcacatacttgcacatacatgcacatgtacgcacatacacatgaattatgtcttggtgaatacacttagaaagtgttgcttattaaagctaaatgttgaggacaagttttattagagtattgtgaatttctatatagagagacaatgcaattcccaaacttgtaaacttaaattatttaattaggcgcaatgtcccccaggctagtgtacttggcgagataaccagggtcatactgagcaagcagctttgctagaatttgaacacaggctgtttggttggagaacacatttgtgaccacagtactctctcttccattttatttttttcctaagggatcttgcttacacaaagacccacagatcacactaggaagggaactcttgagataaagagagcatattttgctgggataggacctaataggtcctaactctgggccaagtcattaaacacagagagtggaatgttggctataaagggtaaccaacacaactggagactcagtgcttatgttggggtttttaaaagctcacttcgcaatgacaatgattggaactttctacccctctcctcaaccccaccccaggattcctggtcctgctctgtaaatgttttaatctagataccatgtgcttctggttttgctttgtttgtttgtttttgacagtctcatgcatctgaggttggcctcaaactttgtacttagctgaggaggccttgaacttgtgaaaggttctcttgtttctacctcccaaatgataggattatagatatgcacttccatgtccaccttatatgatgctggatattgaacacagggccttgtgcctgctagtcaagatctcttccaacttatttccaccctcagttccactatgatatgagaaatttctttgttcatcatagtgtcctgaccatgtcattccatgctacagatttagaatttctcccccactcccaaccaccctccctacctccctccctctcctctgggtagtgctccatgtgtgtgcaggtacctgtagaggccagaagaggacatcagatcctggagctggagttagggttggtgatgagccactcgacctgggtgctgggaactgaatttggatcctctgcaaatctcttaatcgctgagctgtctctttggccctattctataggatttaaatgaatattcattgtgtgatgaattatctacctttaaggagatagcatggaaagtctcatgggagaaagaaagggttagggctaaatatatgactcagcagttaagatcgaatagtgctccctcagaggactggagcccaggtcccggtccccatgctgggtggccatccagatccaggtacatcctggctcttgatcacaacatgctaactgccaacaaggatgctgacttacgctggccccagggagagagacatatgggggcagatgattcttttatcctcttttgttttctgaataatacacctgtaatgcagtgtaaatagactggagtttggattactctttcatgataacatggcaacaacagattcacactgaacatagacctgggcatcacctaggccattaaagggaccacagacttgaggaaaataaacagcttgcaggaatttctagaaaggctgacacagaaaaagccaggtgaggaccaccaaaatgaacacttccctttcaattccagatcctgctcatgcagcagcaaagtgtcctcaagagctatagagtatcttacttaggacattgccatccaatgaccaaatactaatcaatcggggagaactttaaatgattgttatgaagttaacaataagtttgaaggaagcagaaaaagctttcaatattataacagagagacttagcaaatagatggaagcgactaaagtaaacaaatacatatgtaaaacaaacggcagaaggtgtgaggtatgtggtatgtgagacagaagaaagagtccccaggctcagaactcaggtggagaggaacagagaggaaagaatgaaggtaatgaatgaaaaagggacaggtagtataaaagggacagatagtataaaagggacaagtagtataaaaggagcaaacactgccgtattggggttggaaaggctcaagaatgccacagtggcaaaagcttattcagagaaataacacagaaaacatctccaagtctgtctgagtcatttttaaaaagaattttgaaaaaaaattatgcttatgagtgctttgtttacatgtgtgtctgtgcaccacttgctggagactgagcccaggtcctctggatgaacagtaagcactcttaaccactgacccatctctccagtccctgcctgagactgtttagaaccaagttcccaaaggcaaaggatgaagttcaagagaaaagaggcagcagcgcagagcttctcagcagatgcttacacaccaggacccataccaggaaactgcaacaggaggagaaacagagcaatacaggtgtgataaagacactcctagaacaacaaatgcggagataacatgtttctaccaggcctgttctgcaggaaacagtagaggaagatcttcaaactggaggagaaatctgtgaggaaaaagagcttgaaaggtcctagcatgcagcagaagagaagacatacacagagtcctccagctttaaggtgtggtatgaaagtaacaccttcaatatgaaaattaaaaatcactaaaatagtataacaacaacaaacaaatatgtaaaatgggatatcacacattcaatatggtttaaatggaataactatggacatgtcttaatagtgcatcttctctgtatttattggattttgcttatatccttatgttcttgtgaagttgctctcattttgaaatatttagtatgttcaaagatgttttaaagcctcatagtaattactaggtctattagttacttttctgttgctgtgataaaacatagtgaccaagacaacttacaggagcaagattcattttggcttagatccagagggatagaagtccatcaagtcggggaggcatgagagtaaagtggcaggcatggtggcagatggaagatgaaaagctcacatcttcagctgtaaacacaaagcagagacagagttcaaagtgatggggttttactcttgaagtccactccccagtgatggatgtgcttcttccagcaagggtgtgtcccctaaatgtcctcaagcatcatcatcagttggggaccaagtgttcaaatgtccaagactgtgggggacatttctcatcaaaccaccacacaaataaaagaaaatccattggtaaacaagccaaaacatagtaagtaaggaatcaaaacatactaatataataatagttcatttaaccacatgggaagaccaagagggacaaagggccactgcaataaaactagaagacatgctggtgccaacttacctctcagtagttactgtgaatattgatggattggtttacctaattggattaacacagagcaactctaggaagtaagaaaaattaccagacctgagtatatgttgtttacaagaaactcacttcacctggcagaacacacatgatctgaaagtgaagggatgaaccataaaggaaaacaaggataactatacttaatttggataagatgtattgtcttatccaagagtttggggttgggggatggctcagtaggtaaagtgcttgctgcacaagcatgaggacctgagttcagatgccctgtgcctacattaaaggctaggggcagcaggtcacatatataatcccagtattgggggcaagaacaattcaaatcctgaataggttgaaggcaaggtatgataaaggctagagcagaaattcaaaaagcaaacaacaaaaatgcaaatggttgatggcaaaaagatattctttggaaaactaacataataaaccctttgctagaaaatgagaggggagatgtattacaattgagatcatataagtacagtggtcattggggattattatggatgatctccaaaatctagtaacataaaggatggatgggttcttaaacaccaactctaagaacactggttggtgaagatgcagacaacctggatggagtagcagcaagtcatgatttttgagtcttgtttaaatgcagcccattggagaagaacctgcactagctgagtcactgctgggtttgaccaaacatttccagatgaaccagcatcagttcttctcaagtcatttccataaaatagaacaggaaggaatatggccattattatcttgctagcaaagcaggtggcaatacaataaaagaacaatagaccagcatcctcaatgaacacagacacaaaaaaatcctcctcagagcaccatggcacaggagaacatattggctagtgtgcatctgacaagggttatgttgtgttggctagtgttaattgtcaacatcacagaatctagaagcatccagtagatgggcttctgggtatgcccatggcacattatcttgatttgagggaagacctgcccactgtaggtggtaccattccctggatgggattctgggctgtacaagtggagaaaaggagacgcacagcagcaactacccattgttttctcttctgatgtgatgtgaccagctgctccttgcatttatctcacttccccacatgatggactgtaccttgaactctgagctaaaacaagtcttttcttctttaagttggctaacatgattttatattttatatatcaatcacaatacatttagaaaagacagccattgcaagaaaattggacttaaaaattaatctttcccacctgtcaggacaaaaatgtgactttcatatctccctctgattatgcagctcactgttccatggggaacagtaagattgttgagcagcctacagcctaggtgacccccttgggcatcttgaatcagtgaggttgtaaaaaattcagcagtgcagctggacaccctaaagagaccagaggagcctcattcagctgccctagttgaggtgacattgaaaatcgttcttttcccttctgtcatcatgaaactgttttcatttctgaggactcggttaattatagagtggctattttaaggttgtttctgcctacatgatgtttgtgttttgtgtattttccttggatgaaagtcaagcttctccttgggtacttgaaatcagaaggacaaacaggagccaacatttgttcagtgatagctacagacattgatttcattaaactatggctgtgacccttggagtggtacaattactttcatttattttacatgacccaaggcttcaagtcatcagtttgtgtgtacaaagatacacagaagggtgttgttcagggtgatattcagaactatgtactaaaacccaaatccagaatgttctacataagctattataaccctatgttagtctattttccaaaacaccagagaaaaacgtcttaaaagggtactgaccccaagtcttctctgcattaagacaaatgctcttaatcctaagccatctctacagctcctttgtttagatttttgagacaggattttgtgtagcacaggttggccccaaactcattataaagctaaggagggccttgaacttctggttctcctatctccaccttctaagtgctgggattacatgcttgatccacttcagccagccagcacccagctataacaacccaggatgtgaaaacaaccacaagttatgatagcagaataatgcaatgagagagcctgctccccagcctggagtacagtccacgacagaaaaacaacacgaggggtattaaacagagtccaggtggtgtcaaccgccgggaaccctaagactttaactgaccacagccatagagcgagtcctgacaaagctgggtgtgttgtttctgaagcattgctttccgtagaagaggcagctctgggctttaattttttgtcttaaagtaagtaggttggtggcccagtaatccacaaggtcattcccagttctcaaactcagtcttctgatttgaaggaccatggggtgggtggcagcacacacctcagctggaggtaagccaagatgtccctagagagatggtttccacctttggaggaacaggatttgagcatgggagctgcactgagatcaaagcttgttattaacacactgctttaaagatgaaccttctggaaggagcaaagcagttctgtctatagtggagtgttcatatcaatgcaatcttagcatacaacgacacctgctgtatgagatttaatgaaaatctaaaaataaggtctactgtcctgtgcggagaaaatcactctgacagaatttgatgaagagatctcagcatttggaatcgcatgtgtctagctcctgttctagctccgtttgggctggtgagcagctgtctgttaggaaacttaatgatggacatgttccagaaacagtttcctataattcttccacattagtgtagaaatcagccaaggctgagaatacaaatcagtgatttttatcatgcaaaaattattccagttttcctcttgggataaaccttgcaactgaaacacgttggttttgagtagatcccagacctattttgcatctgcaaaaacacaaatatttaaccttaaacagggactaatggtcacagcatctgtgcaactcagtgttgtgaaaaagtaaagctatctgaaatccacctggcaactcattgcctttgtaggtttcctttttatttatttaaagagttaataacattattaaaaatgtgacttttgccaggtggtggtggtacatgcctttaatcccaacactcaggaggcagaggcaggaggatctctgtgaattctaggccaacctggtctacaaagtgagtttcaggacagctaaggctactaagaaaaatcctatcttgaaaaacaaaacacaaacaaaaaagtatgattttggggagagggagaacagtgtattattataatgaagacaaaaaatatcccaaccagctatggtttctttcttggtaatatttttatgtttgttatgtgtatggatgtgtgtaggtcatgtgtatatagaggccaggcactataagccatctgccagaggtgttgggaaccaaatttatcctctgaaagagcagcaagggtttttaagcactgagccctctctccaggccctggtgaagttttcatttggaactggggaggactttggactttcagacagtgttgagactgtgattgactatggggccctttgatattggactgagtgcattttgcaacatgataaggctaccagtctatgggcatcagggagtggaatgtgaatggcccccatagtctcatatattgaattttagtcatcagggagtggcaatatttgagaagattaggaggtgtggctttgttgtaggaaatgtgtccctgggggtgagctttgagatttcaaaagtctgtaccaggcccagtcctctgcctctcgcttggcctatggatcaggatgtagttctcaactactgtttcagcatcatgcctgcttccatgctccttgccatggtgacaatggactaagcctctgaaactgtaagcaggaaacccttctgaaagaaagcatggtgtctcttcacagcaatagaacactaagcaagacaccccctttaccatggacctttaagtctttatggactacttcatgttgaccttcaaaatctttcactgaaatatacacataaagacagcacacatagacatatacagagatagatacacttaacacatgcacacagacaggcacacatacatacatacatacatacatacatacatacatacatattaaggttgtttctgacaccacacacacacacacacacacacacacacacacacacacacacacacacacgaatgccccacacaagaaaaaagtctgttacccctgtttcagattgctgcctagggaaaggactgctccaaatgttcttccctcaacccctctttctcctccccaatgctgaagctccatttcagtgtagcaggggctctggctggaagcttcctgtattctccatggtgaatgacaattcctctcttttctacaagtttagtaaaacaatttctaggtacattatgggtaagtatctagattttccagtgttgtactcagtcaatttctaggattaggacaatggaagcaaggataatattaattttttccttgctaagggattggtggaaatatccaagatacagagccattctagatgtccacaagcagatgagtagataaagaaaatgtgctttgtgtacaccatggagttctattcagccatacagaaggatgaaattatgtcatctgtcatgtaatgggtggaactggaaatcttgttatcaagactcaaggaaaataaccagcatacactttttctcatacagggaatctagatttatctatgacgcgaaagaggaggagagagaacttcaggaatggggagtagactgacaagagcaaggaacaagagagttggggacagaggagacagacatcgtgatttctctcatttgtggaaaccagactttaaatacacatatgacataaaagcagaagggggaccaatggacagggagacaaagagggcaacagatgagcagaatgcaatgatatacttgaatggaaatgccattggaaactattattttctacactatttttagttagtcatagatatagagactgtttatgtagaaaaagatactctgccaaggctagaagatggtacccgactccatggagctggagttacaggcattggtgaaccaccttatgcaggtactggaagtggaattcagtcctgttgaggaacagcaagtgctcttaactgctgagccatctctccagcctctagctgacattcttcacaggttatgcatcaagctgctcaggattgtctccacgtttcttttataatgccctctgacgagaatctactcctggagcgcaagtgttaacacaagtggctttccatactgtccttcccatttccatgggcactggaccgtgcacaggactcagccctggtctgggatgtagtgatgggaagattatgacctttgttctgcagagagttattctagagtgtgacctgaaaatatcccaaagcacagaattttaagattcttcaccttcatcaggcagacattgtgatctcctgctatgagttgggatagatgtttcaatgcgttaagggtcatttcttccttcccaaacttcccttaagtgtagtttacttgcttcctgctccccatcccttcctactccccaatcttcctttttaatatttatttatctgtatatttagaatttcaaacacatacattttacattgaatatattccctctacattctcctacctggcttttatcccctagacagtttccctgctacttctgatctatttagagaacatttcaaagcaatagatcctctatccagaatatgtacataccattgttcatggaggtgacttttgcaactaggcatgttcaaaatttgaaactcgatgaaaaatccattgagacacaattttgcttaaggatctcgggagatggctcagtctacaatgctgagtttgatggttagcacccatgtaaagaaaccctgggcgtggtgctgcacacctataacctcagaactggggatatggaagtgtgagggttcttgaggctttgtgcacagccagtctagatatatctagactgagcttcaggtttagtgagaaatcctctctcataaacagggagagtgactgaggaagatacctgatgtcagcctctggcttccacacacatgtgcatatatacacacatgaacatgtgtatacatacatgatttatatttttaaatttgcatgaaagcacttacctatggcatagagtatagatatctttgagaattcttacactcaggaattattatacacattgaaattggattacaattaatctagaccaaagatggaataaaaagaatgcatatagaatggtaatatggtccttcaaagctttatgccctcaaagtaggtatgggatcattgtagagtagaagagtaggtgtgaactctagcacttactgcagggtgtatcctggtctggcttttactatgaagccactagaaccttaacatatgctagtgaattgtttatggtttgagttttagaatgtataagtggcaagcctagttttgaaagtcagaatatgttgcatttgtgcacaactaatcttcactggttacacaaaacttagtggtgatctccaagggtttgttgtttcaggtgactgggaggttgggagaactgttggggagggagctggtgttcacgaaagtgcagcagagtaagagaagtgagcagtgcggttagggcctccttactggcctccagttttctcttggaccagctccagcttgagccttttctcctttctaaaattccctttgttatgtcttcccttggctctgtcccaccctctggcctctcacttgtatgccccagtgttctccctggctttgtagcagtcagcatgagagtcccaaaggacagttccagttggatcaagcaaagcacaaggcgagtctcatcaccatgtcccagttcctcgggggtttactgatgttttcttagactgttcccattagatagctgcattgtcagctggagaacttctgtgacctgaaggacagaagggagaaaagccattaagaaaaggcagtgaggaattttaaaagtcaggatgtctttaaatagccttggctgaagactgttcccatcttttctgtaaaacccttccctgatgaacagaaaatagacggcatttttttgctctgacagtttctcattgcttttccagtgcagggtgatgaacaacaagcttccttagtgtctatgggtattattcattaatccacttgattcatcccatacatttgttagttgggaagtgagttagtgatttaggacgtgtagccatcatgaaagctagcaacccctttataatttatactgtttcctcattaaataatgggaagtggcagatgatttaattctgcctttctacaggaatggttaagggtgatatatgagcagttgcattcaggtagtgtcatttcatctctaaagtttagcaagggtctccaatgttattgcttctctgagacacattggacaagcaattgccttgagcatatgttaaatacatgggtatcaatccacagtccatgggttggaggaacctgtgtgtgtttattttgcatggcatagaaatgcagcattgtcatctataaagcttctgcttgaaatatgcagttgagttataaaacaattacttaaaaaaatctcatagttttaaaagaaagtttacgattttgtgttaggccacacattgttatccagttcctccatggagtggacaccttgttacatgaaccctttcaaattccagatatttttgtgcctattacaattcagtattctgaacccagataggaagtgagaagcaacaagacgtaaatttatcctgaagctagtagggaacattgcccagggaaagtgagcctagaacggttcacagctatctctgatacccaccaagaccaattttgttatcatctcaggctaaaattcaggctttgtggagatgatccctatctaattaagacataaaattagtgagctccttggtcacattgtgcaatcagcaaaatattttaaatttttttctatttaatttttatttgttgtgtgtgcactcaagtgcatgctgctttttttctttctttttctggagctctgtttctctcctgggacacagtgaagtgcactgaagcctaaataattgccctgtgtgatggactctgagatccaattcaagaggcctgaagaggtcagcaggcaccttattctaaaaatctttcttttgaggagacacctgtttttcttttagggtgccaatcattacatgtgtcttccagcatgaccacattttcagccatctggagtggctgcttcccattgcacaccggcttagtcactgtacacaaacacatacctttgcctaatcttcaacaccagcctgaaaacactgccatctcctcaaccctttaaagttcatgtgtattttctctaggacattgctagtctcttttatttgcagtcagtttaccagtttctgctcatttgaatgccaggcaaaacagaggggatagttgtttttgttgctatttttgttccttagagtcatggtgtgggagaaaacagagatacactattctcacttcctactatgaaataggcaggcctactccaaaggagacccccatccagcaccttctcatttcaaagctatctatggagggcaattatgtggactcccacggaaaagtattcagaaactccttttgcatttaactaaagtatttcccatttcctctaggggtcagtggaacatttcagtgtgggatagtcttggatgcaggtaagagccaaggtctctgatttaggcaccatctggttcaaatctggtctctgctgcagatgaattatttagttttaggcagttgcacgactgtcttgggtcctagtttcctcctctgaagactgaagaaagtgcataagcagaaagcaatgtttgctagcctggctatcctcatgcagtgggtatctggacggtaatgtttatgagcctgactctccacacacagtggatgctatctgatgaacagtgacctccacatatactcaaggggagagggagccaggacttacttgggttcaactcttcatagccattagatagtactgtgtgcatgttagacacccaggaattgtgtatatgtcatgaacaaccaatacaaagtttctccaatccctgatcctttactgtggaatggctaatctagaaatgaccctttgcacaatacttgtgaggaatatttatcttattctgttggagaatgaagttccttctagaaaaggatgttgtttagataagtttctggacctaggaattatgttttactaataattcaacatttcagctcaaatatttcatctggttgtatgctttgtgctttaaacaagacagaaatctatgtctctcttttattaacaagctggagaacagccatctctgcttgtggtacatctctgccccatgtggtctctcatcgtccagactctgctggtcttttgactttgtttttgataaacaggcactgattgtacatagtgagaacctcagcatgattttagctgcatcttaaaataccttcgaggggagatgattgaagctgggtcacactttcttggtggattcaagatgaaaaacatgggcaggtttagtttctgttccttaagcccaagtcaagcactgagccctggttactcagtgaaagcagaggtgaaggtgcagctgaagaagtcaaaggctagcacagttccttctcatttgctgctctggtgactaatgccttcagctttctccctggagggtttccaagctctttgccagctgttcaccttgactctgcctgattttcaactgtggctaaatgaggcagcagtttatgccagctcagaagcagaagtggggcagttggcaaagcatgctaccattccacttaaagagacaccgataaacctacacttacattcatttagttccattagtttcttttctcagaagtgcagtagaacaggacaaaaagcccaggagaaggaagacagtggaccctcagggcctacaacacttcatatagtttggttcatgcctggctctttgggagttttggggtttccagcattgacactaactgtcacaatatcagtgtttctgactttggaagagcctttgcccttcagtgacaataatgaatgaatgcatcagaatcctttccactgacctattaagatgtccctgcctcattggctccctgaggtacttctagaggagtattaggtttcttgcactgtccctttccatgagtcccccgctcccttgtctgcagtagtctctagtcttgaagccacacttgccaactatcgcaacttctaccttccttgactccatgaaatttcagacaagcttgccatgtttcacattctgtacctttttcctggctgctttggtttccttcacagtctctgtcttctcatgaataagatgagttggtgtgtcttgtgatcttgaaatgagcgtagggaagacaccctctcatggaatgaaagctccctagctctctggaaacagtccggagagggctgcaataaacagcatcatgtgcaggttgggagccacactactgctcagatggacatttctgccttttctgggttggtagtttcattattagaatgatactcttccagaatcatgggccagcttgggtttacagagagcgcaatcctttcagggttggtctgaggaaaaggctacgacttttcacagtactgctgcttgaaggaatccaaacccagagagggttttcacatcttggatcagtggggaagacaggagtgcttcgaacttcagaggtcatgtgaaagaagggagttgcgtatttcacacacagcacctcctgttgctttttgtctgctgtgtttgggttttagcaattgtggaagatgaacaatcccacaactgatgtaatttcaggaacagagataattttgaacctttgatatctgatatctaaccccgagagtcatttctctgggtcttccttcaagagttgcttagaaagatatagataccaccagagatgttgggacattgtattttaagcctcaaatgttttcttttcccccctcacttaaaatacctcaaggtaatgtcatctatgcctgaggggagatcattgacaagtagctgaaagttaagtagtagggagacagcagatcccagaaaaggtatgcaggagacagtgttgcttaaagaaaacccaaggatagattttggcaagttcagattttgttttgttttgttttgttttggttttgttttgttttgcatttgtgtgtacttatgcattgaagaggctttggcatttgtagttgtatatgatgggttgtgtcaaagaattagcaacaatgaccatgagcctctaagagtgggtagcatgatactaaaatatggaatactttatttttcagtaattagtcaaagtattatcacaaccacgattgctactcctttcaagtaggtgatggatgctcttgttttcatcagctagcactccattcggacaaatatggaccactctctttctccctcagtgggatgtgaaggtctttcctggacaggatggggaggagagacaacctctactcacattggagtgtgtgtgaacctagaccataaaagtctgaatcacaaggacagatggtggtccttcagggtcactagagcaaaagggttcagagatagaattagggagtcagagaccatgtgggcagtaagaagcaaatagatgtctgagtgaactattttggcaaatgaagaatgctgagacctgggtcttgggggtagacgtctatgtatttctaatgcctgtgacggggtcaggccagatctgtttatagtgaccagatgagatagagctatccagtctttctgctaggccttgtgaatatgagccactgtgactactcatatccaggcattccataagacctttacacatgcatgcctgtcactacttcttcacacagatccctttaggtaaatgttctcttcattgtacaggaggaacaacttcatggtgtggggggacacagccaagattgcatgggatgtagatgtgagctaagttcctcctgtctctaacaattatgatatttaaatatcatattcattatatcataaatatttaagtatcataactattaaaatttgccatccttttttaagctacctacatctattaatcccttgtttcatatgaattaaaacaaggggttcaggggcaggtggtggtaacacacacctttaatcctagctttaggatgcagatgcaggtggatctctgtgagttcgaggccagcctggtctacagagcgagttccaagacagccaaggctgcacaaggaaacaaataaataaataaataaaaacgaaacaacaaaaaccaagcaaaaccaaacaaaccaaactaacaaagaaacacaaagggttcaagaattcctgttgtgtggcccaactttctggacagtagggaatctctggtagtaaagaaaagcaacttgtgcttccctctcaccaggactcctcacttctttctgctcccttgtccctcatgttgcaaggctgaagaatatggggtgtaacaataaatctttctgccaagccacccaaaccccgccgccatgtgggtgcccaaaataacacagagacttattatattaggtacagtgctgctggccaatgactaggattacttatctgctatctctgtcttaagtatcaaccataattattaacctatatatttataaagacttatctgatcgagggtgccggaggcatgtgtcctctcttgtcgggctcacatgccagctccttctcttactacctttcccagaatcctcctcgactcctagtcctgcctaacttgctcccctattggcctacagtgttttattcaacactcaataagataaacatacacagaaggactttccccatcaatggggtctggagtaaatccagagcaccctcacaagggtaagttcctaggagggatgatgtatataatataatataatataatcctctgtaagaactcctggagaaatggcggtatcgaggggaaatgtctactaggttcagggtcactccttctgcttcatgattggagtagataatagctctcactgatacacttcaatagtttacagatatgctgtaccctaaatacatggccattagagaaccaggcatggattagtggtttacatattagaggcatcaccaggcagatcaactggtcagtaattgctactgaccatgggaggtggaagatgactgtaaaggaagtgtgcacaaagaggaaaaatgttcatgattactttagaaaaatgcatggcttctgtctgtgtggtgaggccatgacaatgagtaaataagtgaattaaatggagcgagtaaaatgcaagaaactgtgcagaaggagctgagggccagcgtgttcctggctaggcaaacgcggctgaggagtggtctggcggagagtgaacagggcttcaaagtcatgaaggaaccagaatgaatcagtgcctatttctatgaaagagagagagaaagaaagaaggaagagaagaaagggagggagagagggaaggaacgaggaagggaggcaggcaggctcttaaaggaagtgtagggcagtgtgtgctgaaggagggcattgctagctgctgtcaaggcctgcaccctatagttctcttctatgcctcttcctgctcttcaatttcctcccaaagcactgatcagactccagctagacaccctgtctctcttttctgtcctatgttttctgtcatttgcttcctgcatcagaatgacagcagtccagaatgaacatatttgtttcttgtagacatacttgttgcttctctgccttgatgcggtgacagtggtgggaggtcaggggtcacacacaactgtttcctacaggattctcatatgtacagtatgtacagagcatcataagtggtattagacacaacccccaattatagattaaaagaactgatgaacaggggctggcggagatggcttatagggataaagaagttgctgctaaatctgatggcctgagttccattcctgggtccaacatggtagaaagaaagaaccaattaccactactttgtcctctgacctcccccacggacacacatgtacatctgcacacacagatatttatgcacacacatatatacaccatcacactaaaataaataaaatgtaacttaaaaataaaaagcactgatgaaacaaaactgaaatctagacaatatttttgacagctgatattctattctgagcttgaggtaataacaccttaaaagtaatttattgggaagcagacagaagtgaaaagataatcacatgcaatttcaaaaagtagaggtggaagtgagaaaaggattaattctgtcatatatctaattgtctcattgcttttctttctctttgaataggactacatgtcactttgctgggcagggtgacatagattcctttgtgacggagaacagaaatgccaggcatgtggcaaacagcttccatcccagcactccagagacagaggcaggggaatctctgagagtaccaggccagccaggactacagggtgaaaccccatttcataaaagaacaacagaacggaacagagatagcaccctgaaagttgtagccagcaaagtgctccatcccctctttatatcaaatgaagccctgccctgcatatatctcggtgtctgctttcctatggaaggtgtcttgtctgaataactgtggctgcagagtcactagaccagtctgtgcagtaagggagttgacagaggaattgtccgtatggcacctgacctctaaaaccaatgggcaagtaagtatattgtcggtgacaaaattccatcacaaccactcacctgcttgaattatggtaattatctttcttcctctccctgcactttgcaagagacactgggggcatgacctttagtaggatataacattactaaacacaggatatttaacagatagcatgtatctgttatttatttagtgtgtatatgtctgtgtgcatgcatgtgtgtttggaaacatgaattctcatgcatgtcgatgccagatgtcaaccttgggtattgttcctgagccacttctcttgagacaggatctcttattggtctagaattcaccaatcatgctaagctggcaagctagccagccccaagggtccacctgcctctgacctctctgagctggggtttcaaatgaaacaccaagtctgactatttttaaaatgcaggttctgaggatgggactggggtcctcatatttgcaagacaagcatttttactgactgagccatctccccagcccagtaacctgcaaccatatgtcagggcctttcttccagaagtcttataacctgtgttgttcctcccttttatacgagtgcctcaagacatgggcgatttaagtcattcacccagatttcccggttggtgctgacaaagctgtgtttgtggaactggtgtggcacgctgactgcagagaccacatcccccccgccctttatttcaacacaatgttttggatttacttattttatatggatggatgtttttgtctgcatgtatgtatgtgcagcccatacatgcctggtgtctaaaggagttataagaacacatcacattctctgaaattggagttccaaatggtggtgaggcccccaagagggtgctcttatctgcaagtgctcttatctgccttctctctagctcctgacacccacattctttttttttttcaattaggcattggcttcttttatttttaaactattttacattttgagcttataaaataattacacccatttccccctttcctttcctccctacaaacccttccatatacccctctttgttctctttcaaattcatggactcttttttaaaaagtaattgttgttgcatacatatatgtatatgttactagatacaacaaagcatctaatttggaaaatgtatatgtatgtgtatgtattacatatattgtctatgtatatattagtcagaataatagaagtaagttcttccctaagttctttagcctgagatttgtaaccataggttcttagttcaatagtggtaccaggaatgcatttcaactcgtggagcaggccttcaatacagtcaggaagtggttgggtgctcagatgatgtttgtatccctgttgtactggtagtcatgtattgtcaggccaggcattattgtagcaggatgagtgggaatgatggttacttttctcctccagtagcatgtctagaaccttctagcatatatttaaatgtacacattcatacacatatatagagctatagaaagacaaaaggggacaagataaaaaaacgagagacaaaagagtggagggaagagagagtgggcgagagattttcatggaagaataatatctcatgaagagttagcccatgcaattgaggaggctgtcacatcccaagagcttctggagaagcagcacagtagtcccaggaggactgatgctagccagggtgtgagcacaaagccgagaggcaaaagagccaactctccagctgcagtcgaaagctttccacgagcttgggaagagctaacatttccttcaaggctgaaggtaagagggtacagctggcaactcttgagcagagagaagcacctcttactacaggaaagtttttttttttcccagattttttaaaatttgaattagaaacaagattgttttacatgacaatcccagttcccttctccctccagtcctcccctaccaccaccaccccaactaaaaccctacctatcacatatcctttctgttccacctggatggtgaagacttccatagggtgtcatcagagtctataatatcctttgggatagggcctaggcccactcccgtgtgtcttggctcagggagtattcctctatatggaattggctccctagggataagtactgaactactacagcaggtcctgtagatttccaaggtttcctcacagaaacccatgttcctggagtctggttcagttccatgctggtatcccagctatcagtctggggagcaagattttcccaatgttcagttcagctgtttctgtggattttaccagcctggcctggacccctttgctcatcactcctccttctctgcatctggattccagttcagttcagtgattagtgggtgtctgcttctacttctaccagctgcaggaggaaggctataggatggcatataagtcagtcatcaatctcattatcatgggagggcatttaaggtagcctctcctctgttgcttagattactacaggaaggttaacaataaataatcaagcccaggactgaagtcaataaaatacaaaccaacataaaaacccaacccagagctcacattcttaacctcaccctgccagtcctgctacctgcttcaggctctgttcctggaggttcatgggctgagtcccatggtggtcagacagatcctggagatgtcctatgctagagtcagcacatgtggccgagaggcactgatggacgtgcaacgtttaccaattctgtgttcatctgacagctcaaagttggcacactgggagaatttataccgcagaagaaaacaaaaaacaaaaaacaaaaaaacactacaagtcaggactttcctcccaagaactggttgttcagaacttcttgggattctgctgtctggatgtgctttgtataagaaaaataatatgatgaccatgtgcttcaagaagattcaaacctcttcccagatggcttcgggagttttgcagagtagtttccaaatggtgtctcatagcactttcatagcattctcttaatagctacaagggaacatttactgtgtgcaattcaaacatatatacctattaaaagcaaatatagtaacatgacattgctggaggcatggtgcctctgccaacttctgcaagtggaggcatttgacacggaggatctaacttggcagagctccagggatctggggcagcatgacgcagggaaagatgaggtgctctgggggggggggggcacaggttcacgtcctacctgttacttgctgtttaatcttgggcaatgctttggtttctcctaactccatttttttcttttttcttttggtatgttttatttattctttgagagtttcatacatatatacaatgtgttttggttacatccaccttccctctgactctccaatctctctctgactccctaatccccctcccaacttcctgtcctatttttttcttttcttttcttttcttttcttttctttttgtgtgtcattgtttttatttttatttgttttcaattttttatttgaattacaaacaagattgatttacatgacaatcccagttcccttctccctcccttcctcccctaccaccccccatctaaagccctacctatcacataccctttcttctaatctacatctgactcaaaatttctgctccctcatgacctctgcatctttcctcttcttcccttctcattcttgtagctccctcccctctcttcccatgctctcaatttgctcaggggatgatgaccctttccccttctccagggtacaaagtttgtctcttttagggtcctccttgtttactagtttctctggtagagtggattgtaggctggtaatcctttactctatgtctaaaatccacatatgagtgagtacatatcatgtttgtcttttcctgattgggttacctcactcagaatggtttcttcgagttccatccattttcttacaaatttcaagatttcattgttttttttctgctgagtagtactccattgtgtaaatgtaccacattttctctatccattctttggttcaggggcatctaggctgcttccagtttctggctattacaaatggtgctgctatgaacatcattgaacagatgtccttgttgtatgaatgtgcttcttttgggtatatgcctaatagtggaattgctggatcttgtggtagactcattcccattttcttgaggagtcaccatactgatttccaaagtggctgtacaagttggcactcccaccagcagtggaggagtgttcccctttctccacatcctctcaagcataaactgtcattggtgtttttgattttagccattctgacaggagtaagatggtatctcagagttgttttgatttgcatttccctaatggctaaggatgttgaacactttcttatgtgtcttcagccattttagattcctctattgagaattgtctattaagttctgtgccccactttttaattggattgtttggcctaactccatttttaaggaatattgacaagctaaacctgtgatggctctcttcactaacatcttcaataagtgttacctttatgtccttccatagatgccttggggctagacttcactccaggtgggtttttgttttgttttgttttgttttttgcttttttgttttttttttccaggtgacagggaacctcttactgtctgagtcctgatatgtttgaaggatgtggatgaaatcgtgagagcagacaagtattccagggctgggaaccccattagtgccacaatccaacagcatcacaaagtactgaatggcaactgtaatacaaacagctggtagacacaggccctgaagtgaaccacaacatccaagactaaaatcgcaggacaggcacattgaccagattggacagactcaaatgtgaattcccatctaagtaactcaaagttgttaattagtaatgcaggtattggaagcaggatgagtggaaaataaaatagaactcaatgtatcactttcttagctactgtgttcagtttcccctttgctcttagttgtctttttgctctgtcattccagcttagtctttctttttctctgtcattttttacttcactatgtgctcaggagtaaagaaaccctggtgctagttgcttctgcccttgcaaccagtcccaaggcaccattagaagcaggagtctggagcgaagggacactcaaaacctccttctgtcttgccccctttccaccttgctgctttttttcctcttctttgaccccacagtccaagacacattcgtccaattggtaattataaatattagagttggcagtgggcagtcgggatgcatggagcaaagggaccctcgtacagagagtagcggagggtgtgcggtaggtggcgctctccagccagcaatgctccgcgggattggcaaggtcagagtgcaattttattccggaagtttgaaaggagatgcttctcggcagatgaacgcacactgttccactttacctggttatagtgtctatccacctcctccaccaacacaaccctgtttcataggtgctgactatcccggttctcctggtactgctatgattaaaaccaaaaccaaaaccaaacagaacaaaaaatcaaaaaccaaacaaaaacacctcgaagtacctaagtcttaacatgtccaatcacttcacccaattttggatttgtaaaatatacagactttgtacaagttactttctagctgatctgaaggaatggcctcatcagtggttagcagaaacccaggcctgaaaacacccatcatctttcccctttaattgactttcagtggcatggttcttactttaaccaaaggcatgaggaacttcaggcagattcggctggtgaaggagatgctcttggagcaggtgaatcatattgtaccttctccaaagagagttctatatcccaacacaatctctgaggacccttgggcaagcttgtgcctacttgtatatggggtagtatattcagataggaaaaacccttctgtggtaacattctagaagggctgttgctaacattcctggctcagaccagcaggatctaggctattagaatccacaggagagatccagcccaaccaattatcatcaagacatataaaatcaattaaagcagcaccaggaatgcgttagttgcaagtcattcttgtctcctcaccttctggcctaactctaggattttgtcttagcacactctataaggcagtggtcacttcttgaatcagagctcttagcctacttgtgaatgtgtatgcctctactagcagttgtatagcacccacccttctaagactagtttctgtctttagttcccttctcctgtgctctttgaatttgtgggatgctgaaactctggagattttctttttttcagtcagcttacaactctggtcatctgatgactaaagtcaccccatgccatctttttttttttttttttctctttcaggtgctccagtgaaggcagcataagtaagtatctaagtctttcagttacgacactctaggctgtttctcttctgtgttcacggagctctttaagatttttttcctcatgcagctttatttaaatctagacagaaggtcttgtctcaccctggggtgggggtgagggcatgacagccatgcatcgtggggcatagtctatcttttgaaagtctgtagctctgttccgaaagggctaccaacacaaagaaagcaggccattttactcaannnnnnnnnnnnnnnnnnnnnnnnnnatggcagagtccatccctggaaactgcattagttactgttctcttgctatgataaagtatctgacaagaatccactgtaaagggaagattcttttgttttattgttcaaaggacatagtccaccacagccgggaaggcatagtggaagggagtgtgtggtgaatgatcacattgcatttgcagtcaggaagcagaagcataaatataagcagggcctggctgtgagatctccagtccaaccccagtgacccattttctccagccaggctctaccccctaaaggttccacaatcgtccaagacagcgccacctgctgaagaccaaggattcaaacacacatgccagagggagacatttcatatccacattgcagcagaaactgcatgtattttgggttctcctcccctatcttcctcttcccgtgagtaaaaatgcaaattgagactaccctctccccataggcctttcgccactatgctaattggcttctgggtacactggaggaaggaccagtgagcagttccctgccccttccccactcagtaaccaagctgcatcagctttgccacgtgctctctcctctctgtctctgtctctcctcccctctttctttctctttctccccctccctagactatgtttaaaatagaaaaggtcagtcttgtgtcgggtcagagactagcatttggaatgaactggatccacaggggctcagaaggattaactacagagggtggagtaagtttcttttgacctctaagatgcatttgtcatccaagtactgttatttggaaaaaccacagcttaaatgtcggagactgaatgtgtgtttgtgatatatggtgtgagtttatattgtgggtgtgtgtagatgtatgtgtcaggtggggttgtgtatgtgctatatgtgtgtgtatgtgtatatgtgatatgtgtagatgtacgtgttgtgtgtggctgtgtatgtggtatgtatagtgtatgtgtatatgtactgtgtatgtgtgtgtgctgaaatggctcatctgtcatctcttaaagactcatcatgacttaaagcttttttcatccagcacataattatcattatatactgaattaacttgaaatgacagatatctgttttatttgattatcactataaatcggtcatattaaaatgctgctggtttattgacttgtacacttcaatctctgagctctctggaggccagaggttttaaaaaatcaggagtatactttgtcttgagtctgagattgctctctctggaggagagccagcctggagagaaatcttttctccaaacctgttctgatgctcccccttgctgctgtctgaatggggggcttgaacactgagattcttggtttggggaagcttttgttcatgggtgtgaagcaagtgaggtgctccagcagcttagaggactccgcagcacttggcgagaagggactcagagcactttctgacggggccattgaaaagtcagctctatcaggctgctccaccctttctctactaatgaaaataaacgcagttctggcacaccagctgtaatctggaaatgggttttagaaatccactctactgaataaatgggctattacagcccatcattatggaggccaagaaggtacattagactagagggaggtgggagtggagggggcagggaggggagttaactatttcaagatgttgatagagcagaaattttagtctctaaatttttatcttcctaatgttcttactgacagctgaaaaaaatcacaatgtcaagaactgtgaagggctgagcttctttctttctttctttctttctttctttctttctttctttctttctttcctacttgtaagtgactacattagccagctagtttcttagctgcttttcatagaacacacaagactctcagggccaaaacaaagggcatattactcagagtactagaaataggcagagtatgagactagtatgaggacagggagagggagaaggagaaggagagggaggggccgagttttctcagtccaaatagccacagggaatgtgaagaaggctgggcagcatctgcacatggagtcgactgtatagccagacaggaacttgggcatttagggactttaatccatgatgatgggtagtaagctcttcttgcctttacaggtagtgggtgtagtctgtctcttgagagtgatttctatgtagacacctttgggaagacagcacaactgaggtcagtatttctgctaccgaaggttagggttagggttaagattcgtgagctctctcaggaaactgtcttcaacacagaactcatggaagcctgtggcgtctccacccacttaggctcttccatctgaactgcaacacattgtttcaccacttccagtttctgctctcacaccaggcttggaattaggctggttatctttcttctcctggaatatgacccttgaggaataccagtcatctttgcagtcaggaagttagcagagcacatacagctggtggaaggaagtaaccggggctgagggagaggagcaacaacttgcttgccctagctatgttaggagaagctagataggggaggggggaagggcagcatgtagggtgcaatggacaaaaatcaatgagcaagagacagggggtggggtgggggccagagaattgtcattctcctccttataaaaggcgatatattgtggagagagagaggtacagagaacagttatctgacaggttaacaactactgtttgtgacaagcagattgtcaagtagaaagaaaaagagaagggaaaggaaagaaagggggagagcatcccacagagctcaagtttaactgcattagttagttttttctcttgaatatttttaatctgccacttccaatagagccagggacagcactcagcatcgacttatgagaaacgaagccatgagtcatagactgctggtaaggttaaggctctggaggaaactgccaggcagaaaagaaaccaaaccctcacgcacagagctagctgcaaagataaagaaagactcttgctgtaggaaagtccctctaacgtagtgaatgaaaacatgttatgtaaaagttaagtgtgaagattcaatgtctacaatttacagagaaatttaatccggcttgttcttaggctatatgagggactccactggtgccagcataggaccttcactcacgaccttcctgctagacttggtgagtgtcaccttggagctttctaatcttgatggatctttttaatctcctcagcatccagacaaggcttgaccaacgttcctaataacacagtagacaggtgtggaagtgaagtgtgtgtctgaacctgatcatttctgcctaactctgacctgcagtggtaaaattgcacttgcttgctaaagacactgcctcagcagtcttctttcaggaattcttgcactctgatatttttaataagcagcaaaatttcttcatgaaacactgtgtactttctcatcttcattggaatgattcaatctaggtacttgggttttcctgtagaccagcttcatagtctgcaaatgttacagaatctgtaaacgtgattagatagtgagtataaggctgggtcctatataaattaataattactacataagtagcatcctcaacctactcttctttcctaaggaaaggataactcaagttagccctgtataaaaaaaggaattctagtagttttctttttagttcaaactcccagtatcatcctggtccctactgctctgatttgatatcacatccttcctctctgtagtttccccatgtagtgtatggacatgaactttgacctcacatagttcagtgattactggcctcctctgttctctctgactttagatgccagctctctaagcctggagacctctagaggttcagaatctatgactgtgaattgtgtctactcaactggcaagcacaaacaaatgagtaattctttgtgttcacttgaaaacaaagctgctgctgctgctgctggtgggtgccttcttccatagctttaaaaaataaaagaagccatgaatttaccccccagatccccttcttccaaaaagtgttctcatatgcatttaaagctagagaaagtgggaaaacgagaaaaagaggaaatgtcctaaacttaccatctctgatgtacagagaacatctctacttatgtattccatcattatgtgaaattcagcatgcttaaaccaaactctccatttccttctcaaagcagcatttctgattagcgttcctatttcagatttattcccatagcttcctgagcacaaaacccctgagtcatttatcacagccgcctcttccaaacactcatagccaatcagtaatcaagtcctgttgtttctgccttcaaaataattttcatatctttctctttctgttaccatggataccatcgaatctccctttttttgcttcatgcctggacaactgctgtaacttctggagtctcttggctcctatctagcctgcatacagctgctgctggaatgaatccctttgttatgttcacacatacccctcccctgctcgggacccttgagtagctcccttttgttcttaaagatcaagttctttaacccacatggccttgcagagttggccatatttaaaagctctgctaatttatatgaagtttttgtgtgagattaagatagtacctcccatccctaggctagggcaccagtggggtgccttagtgagtagattacacttctcaatgaattataacagatttgtatccctgatgcagaatgcagagaccttgaagaacagggcatgtcatttggtccccagtcacttagaggaccttgtagaacaatgacttcatagttacagacagtgtattgcagtctacctgctcaaaatagttgctctggaactcctttctttcaattttgtcttggtgtatatctatgcatgtgttcatgtacatgtgtgcatgcggacatgggtgcacatacatgtatatgcatgtatggaggacagaggtcagtgtggttgtcttcctcagtcactcccattcgtattttttaaaggcagaccccctgaccctgaaactcattgatttggtgagactgactagtcagcaagccccagggatcctcctgcctccactccccaagctctgggattacaggtgtgcaccaccatgcctgtctttttacatggatgtaggacataagcacaggtcctcatgcttgcacattttcctaagtaagtcaccttcaccaccctcaatacatttctaaaataaccttgcttttccagacaatgctgtacttgcttttacccaaattctttgactcatggctttcaaattttttttgaaatataatttagcttctttaaaactgtataattcttgtttgctcctcaaaattcaccacaaccattatttctatgggaaaactttttactctctacatctagaaacattgtatttctgatgttctcatactactacatatttagttctaggccacgaggactcagaattggtcagatactatgcatagaagctatgtatgttattttcaatttttttaatgactaattttgtctcagtctggaatttctgccaatgctagaaaacagaacacattttaccttcaatgtaactgtctcctagataaataaccagtcattccaaatagcctaactcttgcctcaaatagtgatgtgacctggcttcggggcaaggcttgtataactccagtgtccgggggctgctgaggaggcagattgcttcacgctgtcctctgcctacttgggttctcagcttggatctgctccacttgcatcatctcacattaattgtgaagggttcacatcacatctgctgttgagcatctctggcttttggaacaggttgtgcttttccaagatatgatgcatggtggagtctctaaaagagcttggcttttgtttcccattcagcaggctccaccccattttgtctttctgtacttcaaattcccagagactcccccaatgaggtccagctaatatttggatggagtaaattaatcatccagcattcatggtgcatattttctgaaccacccatgaatgtctagatccttccacgtgatctaagtgcctagagaaggctgggtgcacagcaccacatctctgcaaatattccttccatattttgttgctctaaagttccaaggctagctgggcagcctgagaaagcagagcgtaagagttgcttgtgggttttccttcaacacgtctgagatttttactgcattatagatcatggtgaaatctacctgcctccatgcacacctggcctctgtgctgagagtggactcagagacccatgatcaacctctccccatcctttatctctagatctcattgtctgactgttgtgcctcaaatcagaagttcttttcactttcttcttgatccttagaagaacagcgaaaccccaatgggtcacaaacacccaagtttccttttatctacaacttctgataaaactactttcagttctgaggtgagcaaacacattcacggctgcagtttgccatgggtttcaagaactctgctagcttttgagttatagcgaaatcctcccagaggaaacagttcctggtttagtagaagtcagtcaaacacaaaagaagattattaatatattatacaaatattatccatcagtatcctaacacttgtgctgtattatagccttctctcctgtccgttctcctttccagtcttgctttcctatggggtggggggatatgtcctactcagtgttaagtcctgatataccaacacctcctgtagggagaatcacacaagcagtggagagatggatgagcactgttctggaaacctctgggttcctaagcaactggcttgacagtgattgctgaggcataaattttcagtcctgctgcttagtctccatagtggccagaaatagacacattctgtgttgcgttcagctgctaaaggcagggggagtgcagaattcttattctatggagcagcagagggctagtgctgacctgtatagataaccccaggaatcctgctcacatgtaagttgtaatagctgtatgaaacttgtcagctgttacagtcacagggcacgtcagcgcccttcgagaagctttacatgtgcatatgtacttgatcattccctgagagctaaaaagtggcttctattgttatcctcatttcatatatgaggaaatgctgtgaagtcaaggaagctgagctggggcagggacacagtctcattaacaggtgctacagtccatatgagaatcccactaaagcaatgctagcagaatatctgcacctagagccactctgtcactttagactcaagctgtatccacctgttttatatcccaggcttgatgttctgagcaactaactctgttgcccaaaggaaggaaggttttcctcaaggagtggactatgcacagagggactcacaagcaaattcttcggaaagaaattccctaatgaacaaagtcagagacaatctgtgtccatgttccagctggctttacatgataacataaagcattgctttgcagaaagcagaacttacatttttctggataaaggccatctgtgaaataaacgaggtagaccaaaatggaaagtgcacctgagtcttgagctcagtcagtaccccctcaatgtcaccctacctgggaagcatgtggcacatttattgaactgactatattcatcagacttgtattacattctgctttaaaaaacttgtttttaaaaagtaaagagtgtcttaagaaaaagctgttttcaaaatatcatctggaacgtgcttggtggtattatgtctgcacacaaccatacacctttcaaagccactaaggggatgtctgtttactcattggccacaaatacacatcagtctttgttgtggagaaaaggaaggaaaatacttccttacaatgactgagttttccaagctaaaaatgtgttggggtagattatctagagtccctgaaatcttgactatcttatacagcttgctatatgtgtttgacagcgagtaagtggagacagggtgatctagttctgaatcttgactttatatctgtagattttgggcaaattagttgacttctttaggcttctgtttactcatgtataatttggggcatttgtagtattgacacctttgtaaatgttgtagggatatcataaataaaaaacaaaaccatagaggcaaagtggcatagtgcccagagtagagtaaatagatattttgttattcttaatactaacaggctggaaacatatgtctgtgttggtatttccaaatatgaccagctcttagcaatgagcaagggacagctcattcaaggatgcctaccttagaatataatcactatactgagacagatggttggtaacaagtaagtggatagatagtgacagggtacaatgtgacatgagagcagatgaagggactatttgaggtgatgaagagaaccagcaaaggtagtcagacatgtgggagggtagtatgtggggtacatggagaggtgtaggggagtaggatgaggagtacatacagaagctgggagatggctccaaggttatgagtacatactgattttgcagagtattcaagtttggttcctagcagccacattaggtggcatatagccaaacacctgtaactccagctccaggaggatctgacactctcttctggtccctttaggcactgcaattcatgtatacttaccctaaacacagacatctgcacccataaaaataaaaataattaattatttaaggatcaaaatacaatgaccaatatgcaggaatattctgtaactaaaattattacttaaaaaatgttatagcgatgctgcattagatactaagggcacagggtgaataggctcatttcttttaccctcaagggtgtactgtaatgaaccaatcagcagaagtgctgacaagttcatttctgttggtttgtactaggtgcaaggctaacagtgtaaaggaacactcaaatgccagcatgggaatagaacaggctgtgagaagggggcattttaaactagaagagggacttagtgagtcatggacaaaaggaacaacttgtccaaaaaaagcatgaagatgaagaggtctttatttattgccgattctcagtacattagtatgatactaagctaagcatcaggtgcaaggaggggaacttgggcaagagcctaaccatgtgggaagggatttgaactttcttgtggtagaacaaggaaaaagcagaggtagtgaaggaaaggaatttccttaagcaaagtgactaaagttggttttagaaggaccactccagagtggagactgcagtgttggaaacacggtacctggtcaggggacagggggtcagaaatgagtggggacagtccactgggaggcgagatgagtgtgtaagaaagttaccgtagaccaagcaggtgtgtgggaatgctcacagagagcttggaggtagtgcctgttcccttcagcaacactcgggggcagagacatggacgtgggatatgacacaatacgtgggcacacctgctttcttctggtttggacaagtctggaagaagtacacatcggcaatggcaagaaaatgtcctgacgtacaaatgaaaaaaggatttggatgggataggtctggggtcagtctctggacactaagccgatacccacccacagttataaagtacagttaaaaaaatacatttgtttcccaacacagcactgataagtaagtaaattgtaaattgggaatgagttctctgaggaaagaaacaacaagaaacttagggtcaagagaagacattagaatgggaactggacacagtagggcccaccaacgagactggtagacaagaaggaagcaggagaacaatggctgcagagtcccaaggaggaatgaaggcaccaaacagtcaggagtaccagtgccacgaaggttgggtaagaggacttgcaacactcgtgtggctggggactctaggacatactgagactctggggaacagaatcctggaagagctgacatggttcattgttggctagcatggctctgaaggaaagagaggctggaggatcttggcaaggaggatggaagtaaacgagctttttcttagtgacttcaaatattagtgctgacttaactgggccttctgcttgggatggacaaaaccaagtcaaaatcaaatagcagtatgttggcttttctattcggagagtcctggagttctgtgttattggcagagttatatttgcttatgtttattgggcttaggatacttatgtctagatcaactttcttgaattcttcattttgaagaaacggttttcaaagctacagtccttttgattttttttttttgtacaaatctcatgttcttttagcattcagtatttttaggttttaactgtggtttagcataacacacagttttgccttctcagcatgtctttaagtgcatagtttactagtattaactgcatggctcaaaagttaaattcacattgttctgaaatctatctctagaatgatttttatcttacaaactgaaactacctccctattaaccatctccccgttctcctctcccctcattccctggaaaccacattctacgttctgtttctaagagctgtttctaagagctgtttctaagagcctcccgcaagccagcacatggagttttcctaccatgataggtttatttccctttgcataataacctcaattttatagcatgtttcccagtttccccatgaaagattttaaagatggaaaaggtgaaaagccatggacaatgtagccacaggaaaagaatcattccatgtgttgagtttgggcaggttccatgtgatatttccccctttgagaatcatttgtatgagcctgataatctttgttctttcaactttgtaagtgaaaaagcaaatggatccagggataagtaaccctataaacatcaaagcatcagctggtacggagtgaagtcaaggctctaaagggggtgagcagagaggcagctgggcacctgtacaaaaacaatgaagagtacaggagaggagaacgtagatgatgaagggcccaagggcccagggtctggtcagaagcctcctccttatgagtcctctcaaagccacccgtattgtcatagaaagaggttattatgtgcctgaggaaggttcatggcaccctttagtttgacttgggtgggtgcttcaacaatatatggatgacaaaggaagggagcctcggcagggaaaccagatgccaacgaggcacatgaagcacacaggactgggtgcagttaggtgtaaatgctgagctggtgtttggcaaggccccggttctcaggggcattatgggggtattccctatacttccaggcctggccacctcctctaacatctctcttgctgtatattttgctgtctgcttgacatttctgcttagatgactaaaacgtaactccaactgcatattttcagtactgcatcagccttaattctttccccaaatctttgcctctattacactgccaaggtccagaaaatggtggcagtcttgactacgtatttaggggaaattctagtcatctgcttttggctcctgaagttctctcctgaaagacatttacctccttccatcttctctgaattctcagcccaagtatgatcatttcttatttaaaaccccttttatttaccttgaaaactttacatatgtaaatcaagtgtcttggatatacacactctcaatcttcccctccaattccctgttgggtctgtacccatcttcctccaaacattctttctttcttttcctttaaaagaaacaccccaccatgctgcttgtatatgcacaggtatgggaccaaacagtggccacacacccaaggaaacggaacagtctctctaactggacttgctgcatcacttttgcctacaccaatggtccaaaaatgtagcttcagattcctttaatgttttctcactgtacttgggataggatgaaattctccactctaggtctgagtccagatgagccctgtgacctcacctccttctcccttccctggagacttttcagtggcaccatcttctctcaccttaggctgttctttccaccaggtgcctttcccttcagatcttgtttccttaggacatttgtggccttagctcagaggtcttattagaagggtgggtctctgacacccagcctgcaagcatctttcacacctgtccttccatgctatgcagctttcttttattttccatccaatctggactaatcatatgtatttgtatgtttatcctcttactcccactagagtttacactccaaaggggagaaacttcatatgtccgccagccaaatgcctagaaggcgatcactgtctgctgcaaaagtagatgctcccaatggagatgcaaattctttccagacgtttcggggagattgcaggtggatagagcagacgggagccatactctctggacagatttctgcttccgtgaaagatgacagaagagcgcattattgggtaaattaacaacagcagctctggagtcttcaggttgcagggcaggtgtgtttgaaggggaaaacaatgtggtattgatctctatttctggctttgtgaagaaccaggaagatgaaatcagtaatttcaagatgagtcactggaaacaagtggtttcacagaacaccttgaagttttaaacagacggagacaatgaggaagaaaaacacagcaagctctcaggcctcataaagccttacagcccagagtgagtgtctaagccaggggttctcagcctgagggttgtgacccctttgagatctaacgaccctttcacaggggttggctgagaccatctgaaacacagatatttacattatgtttcattacagtagcagaattacagttatgaagtagcaatgaaaataatttaatgttgggtcaccacaacacgaggaactgtattaaagggtcacagcattgggaaagttaagaaccactgctctaagccacagcccggctacccaaggaatgagtccttccagttacttgtagatggctatcttcctgatagatgacagttaaatttttattgctgtcaatattttttaatgaaaaaaagatgtaagtttttttcctaattaaaagaggcacctgagaggtggtggcgcctcaggcctttaattcgagcagaggcaggcggatctctgtgagttggtagcctggtctacagggtgagttccagacagccagggctacacagagaaaccctgtctcaaacaaaaccaaacaaccccaaaaaaccccaaaaaaccaaaaccaaaccaaaccaaaacaaacaaaaaacctcatgagcttgagaatgggatacacctgggctgtgtccaagttctatagctacaacagttccataacatgggtgtgtaactgcgctgagctgctgtactgtgagaggagcctgtggagagttcccagaagccctgtctcgagggaggtaaaacagtcaacatgtctttatgcaccaacactgcttttctgtaaacaccccaatatcacactgttctttttctcccataatgtttaattgattctttgtgaatttcacatcatataccccaatccctctcacttctcagtccttccatatatgccctcctcccttgtaacctctctccaaaagaaaacagaagaaaaaagtctcccagtagaagctgtagtgcatcacacagtacacccttttaagtctcccagaaactgtagtgcttcacacagaacacccttttgttcaaccagctttgctcacagctattcattttaaggagtcattggtctggtttgaggcctctgcttctgctgcgtaacatccacgggcatcaagtcaagacccaggatggagcccagtgggaagagtttctgtccagcatgcatgaggcccagcgttcaatcgaagtcccagcatttgagacacagagacaggaggatcagaagttcaaggttatcctctgctacatagcaagttcaaggccagaatgaactacataacagcttgtctcaataaataaatgaacaaactaacaaatactagtcaattccaacttggtgttctttgtgacttctaagacattgaaatgccacattacaaataatagtcatatgacagcagctcttccccaagagttgtttctgggcctccaaaagcctcttatccgtggaggaacctgactggcaggttttccaagtttctctagtgaaaaactggactcaagaaacattgcaatgagaatctgattcccaccacaggggtaggagagcaggctctgnnnnnnnnnnnnnnnnnnnnnnnnnnnnnnnnnnnnnnnnnnnnnnnnnnnnnnnnnnnnnnnnnnnnntaggctacagttttctttagcaccatgaacaagtacttgactcatgaggaagtgcatttcgtgcaacactgcccagagatactccatttcctacaaacactaggaaggagacctgacgttctgcccccaccttgagaagcttctggaagaaagggtgaaacagcagacctaccttgaattttttttttttttttccgagacagggtttctctgtggctttggaggctgtcctggaactagctctagtagaccaggctggtcttgaactcacagagatcctcctgcctctgcctccttagtgttgggattaaaggcatacgccaccaacgccctgctcctatcttgaaattttattccttttcatgttagcagttccctgggaacatttttaaaagttggtatttttgacttctagagcaatcatgtttgactgtgtacatagggagaaaacacatattcatcttactgtgctgcctttgtatccagcagtgagagtatcttccaaatattcttccctcacttgtaactttagtgtttttaattaccatatattaattatacataacagtgggttttgtcacaacattttatacataaataatgtattttggtcttattgccccccccattctccttctgtcctccctctaacttccaactaacacacttgtaatttttcttatgggatatgaccttatcataccatcacctaagtgcatttttatttcttgtattataccttggcttgaaataccaaaattagccctctatggaatataataatgaatctgattttatcacttcaattattcataaattgtcttttccattgagcattggacaagacacaggaaaataactatgctacagggcaaagacctacagaagggcattcagattattccatttatgaaggatgcacccccaatgttagtctgcaggcttccattgttgctccccccagtctctgcaggattatcacagggggcacagacagggttgtccaaatctacatggatttcaatactcatttgacgtttcaatataatctttgtgctcttgaatctctatgtggcctttgaagccatatttacttttaataatagtagtaataatgggaataaataatgtgatcgagccagctattggaaaggatgcagcaggaagatggcaagttcaggccctgtcttggctacagagtgagttccaagctagcctgaggggtagaaaagctctgggcgttccctggaatgctccggctgtgggtttgatccctaagcactgctaagtctcagttgtataattaactctgctctcagtgcagtggacagagatatgaatctccaagactgtcacacagcatagcaggtggcaggtctttgtgaatgtaagtgactattggcttctccttcctattgcatgttctctctgcaagatccttgggtccccccccacacacacacacatagttctggggcctctgctgagtgctttgctggtgacattttcacccctttgcctccacagagagccacattatcacttttccatgtcccgctatctttttatctttctagacttttccatttcttgctgttgtgtttcttaagcaatgatgtataaggaactgcctgccatgcaatgagagttcaaaaattttacatattattgccaggtgctggtagtgcatgccttaattccagtagttgggaatcagaggcaggcagattgtgagttcaagaccagccttgtctacacagtgagttccaggacagagctagacagagaaacactgcctcaaaaaaccaaacaaaaaattatatattattatcatctgtatgttttagtgtgtatgtacacatatgtactcatacagcatatgtgtggaaatcaaagcatgactgtgtggaaggtctcttcttccacttttatgtagattctaagggccagatttggcttttcaggtttgcatgtcaagcattctaccctctgagtcatcttcaatctcagcagggatgtttcttctattttttcagctatggggtgagtttggggctcagtgttggtggctctctcacctggggttggatttctcagaaatagcctctattttgtttaaatttctcagccagttttgaatctgggtttgttccagattcttaacaggcccagcatgctcctgtaaggacattcaaggttttcctatacatcagttattgtaatggtacttaatattccacatgtgtggtataccagaatgtacagccctgaattacaggctgttttccaggaaggcttggtacagtccttggagagaatatgcctttgggctgtaaatgcttcaagaaagatgcagttatagccatcacagactttggaggatctttaaaacctattacaacaatgtagaggttgaaataagatgccaagaagtaacctttaggcatggtaggaggaagcacgcagtgtgggaaagatagcattagctgcaaattgttccagtgtggcactagaaacccaaccaaaactgacattagaagagtccactggttcatgccaccaaaggaacaggaagtgtggcggctgacttctgggtcagcatgatgccaaggttcttgctctatctccccccactttgctcctctttgtctgaggtgccctgctcaccatacagtgtgaacagggaagctcatatgacttactgtcccaggcccttgcctccatggccacctttccatctcagtggctactgacccttttccagtgttattagtccatgtaaatcatatgggagattctgactcattcagctgaggtctttcgcttattacatgataggccatgctatgcttgtcctggcccttgtcactcgcccagccctgtggtaggtggtgtgtgtgtgtgtgtgtgtgtgtgtgtgtgtgtgtgtgtgttgcactgaaattttaagtgtccctacaagttatttatttggtggaggtggtagggtgaaggttggaagaaattacatgaaaataaaaagaggaatctatcaagacaaaaataagagacatactgtaagacaatgaagagggaactcatgttttcttcagtttggaaaagaaaatggatgaaaagtagaataaatgtccaagaaaacccagaggacaaagaacaaatgtgtgaggaggatgcccagcaacaatgatagccattacaatgaacacttgaagactctctggagtatttgaaaattttaggctttgtggaatatagatagctaagaggagagcgtgccattaaaagtatggggaagcacagagtggaagtggttcaaagacagagaaaggagtattgttagaaaatggaattctcccaaggacgtgatttagattttatgtgcttataaacttagaatggccatgggtagctgtctggaagagtcaacctcgaaagatttgctgtggtacaagcatgtcctatgagaagagacactctaggaaatgtggccatgagctcggctagaaatcactctctgtagtctgatggagccagctccaggcagctgagcatcataggaaatttccagaaaggataccggtggcttactttgagctgaggcttatgtcaacatcaggaatcacacagacaacacaatacagggaagtggggctagcattcagctcttcaaggtccaaaggtttatgggttattctttctgtgggaaataaaagttgggaatcaaatgcagcaaagggaaaattactcagtgagaacaaagcatgccttccttatggctcccaatgaagaaatctgtcgttacactctgtgcagaagatagagcagtgaggaatgtctcctccacctgactgacacaggtggctggccagcatcttgacttaccttcatggtggaataaaacaatctaagttcatgtccctgtgtattaatnnnnnnnnnnnnnnnnnnnnnnnnnnnnnnnntgaatcctagccttgttcggatgtgacactctgactttctgagtcttggtttcctcgtttggaatagagaaacctggtctgaggacctagactttctgtttttagtctagtgacttctaagtgacaatgttttcccccttaacaggatggcaatggaaactgaatggagaatacacagaagtgctgcatatgtaggtggacagagaagggctggggcttatggtcagggctttgggattcaggaggaccatggcagggtccagcccttgggtgacaccctagacagactagtggaccccaccatgtccacatccttgtcctctgagcttccacctatcataccctccacgtcaaggggagctttgcagagggttaagttaggaccttggtgtcaagacacaatcctggttggttcagccttttaacaaacagtgggttgatgggaccgagacccaaggcaaggcaccttttctaaggaaaggaagtcagtttttttggagtcctcaatcaaagccaccatttttttttttgcagatttttttatttgaattagaaacaaaattgtcttacatgacaatcccagttccctctccatcccctcttcccctaccacccttctcccaactaaaaccccacctatcacatatcctttctgctccccctggatggtgaggccttccataggccaccaatttttttgttgttctttaaaaatactgaattacagccaaggctgttacacagagaaaccctgtcttaaaacagaacccacaaacaacagccaaacaaccactgaattctacaagttcttgactgacactctaaggataccatcactggtgccaaccagtcaggctgttctcaggggaggagggccttcagagggtgtagccagtggcattcagatgaacacctcaagttggaaaagtggtgagggaagtgggcacgaggaagggattgaagtgagctgtagtttcagctcaggctaaaagaaggatttttctctaagtgatgaaagctttcaaattctccctgatagcttttggaaatgtcctgtgtacattagtgtacatttaaaaacaattggtcttctcactacttagtgtaggatatactttgtttgattgtgactttgaagctccatgaaagcagtccgtgtcttcaccgttgaccatcagaggtggttcagtatgtggaacccatctgcatggctcttgatgcatttgtgttttgttgctgctgcttttagagtttggtcccaataagtcattgcctataataaggttctgggattttcccatggagggttttgtgtcaacttttctgtttctgcctttaatccagctctagttgagtggtgtatctagtgccagaggaaggtctaatttcattcttctgcacatgggaagatggtttctcaatacaacttactggagaaattcctgaactttgtattcttgacagtgaatccttgctctgcccaaactcaatctctcgcctctgcacacacccctccattgtccagaccctttcctgcccctggttccctggaacttggattaaatgccttctccatcctacgttagattgttacctctctcactggctattctgattctttcttggatctgatcacaatgtgtaatgagatgtacttatctgttctcttcccctcctgctgcacaggaactttttctgagaacaaattctttcagacagggaaacacaacacctgctcaaagcactcccacctgggcttaatactagggatggttccactggccagggtgtatgcagaagggtggagagggtggatttggtgccccagagttagtaagaatagagcccttgccaccctagtcagcagggggaaaatgactcattcctgggggagagagagaaaaaggaatggagaggcacctggcaggcatccccaatattgacaacccagttggccttgctaactccatgcaggaagccagggccacagagaccccgtgtttcttctcctttctctctttttcagctcctgcaggaagccggagacccaggatgttcagagatgtcctagagggtgagaaaggaggagtgggtagaaccaataacagacaccccatccacctaactctattcccaggactgagctcagaacattgagtgtacttattagtcatttgcacgtaatcacaattgaaaataaatgacgattgaatcaaacaaattagtttcctgccacttcttttattataaatcccttctcattagttttgaggagatgctgaggatatttgtcccaggcagactagtctaagctctttgaggcagataggccctgcaggcatctcagcttgaggaagtcttcatggcctgggaggcagtgactagcacacagcctctccattggggagctattgtggactttccattgttcagctgttgcagctgggaggagggtacttgacagaagtgagggtacagctctacctaggaggacagggactgactggcagttactcatccattctacttcccttttctgttcctccatcctgatggtgagaggatgatgtaacctcctgcagccaccaaggtgctcaatatggtggaacagcacctctggactgtcccatgttagaaatgggacagtcttatccatgccctcattctgcatcttgaagactgctgcacagcctgaatcctaaatggaacagagacatcctggcactaagggaggggtcccaagcactatcccctcagataagttgtgatagtctcagaagatggaatcaaacacaaaagtaagcagaaggaagctgtgctgctgggaccttcagtatgaagatagaatactgtatgcctacattataggagcagggttgacattggtggctaggtgggaataggggtgatggggcagaaggcacctagataagcttattctgaataggagggtttgttttggatattcattgagcagactccgagtcaaagacatactgtatctttaacaattttttgatgcagttgtactgggaaatatctcttatttgcatacttaaaatagacagggtttagtccaaagtcagaatcttcacgctttgcttggagatggcggatgctcagatggaaaagtgagggagaagcctggttcaggcaggcctaggctgcagtgtgtccctagagtgttgtgtgctcattccctcacacttgcctggctctcagctctcagggcttaatcaaaaccagagcccacagagataaatatgcaaattataatttgaattattcatttgctgaagagctatttcatacccatacctgaatttatatgattatcagagtatcttcatcttctgtttttgctgttagaggctgagcagactatgtttctaggattttaggatgaaactcatgatgggtcatgccatggatttattgccacatttggaaaacaaaaccagtaccccactcagcatgctccgtggaagatgcttgtcagtgttacccatgtaaaactgtgggatggacatagaacactgttccttagaaattataaaaggggactgattgtggctgatttagtggggtacctgcctgacttgcacaaagctttgggttcagtcaacactgcacaaaagggtgcacacccatgctcctagcactcaggaaggagaggtgggacgatcaaaagctcaaagccattctcaattatgtagttagctcaaggatagtctggactataggagatcctctctcaaaaaacgattaagaagtgacagagggcactaacagaaaaatgagaaaggagtgatgggatttgctttactgagagatgagtccaggttctaggaaaggggtttgtgtcatatgaagaaattatgttcgatttagagctagtagtactccacttactcatatgtgcagtttaattttaatttcaaatgaaccaagagtgccattttaaaaacaggaaatcatcactaatccagttaatatttattttagggcttgttgcatgatgaatgctgggtacactacagtgagctcaggagtctcttcctccttggagctggatttcacagatgtgtcaactctgtagtctcagagaatgttctagagaccgtgctcagatactcttctcaggaaaatggaacaactctgacaatcctcaccttcctttacttttaaaattttgttttttattatatatacatatatatataaatatataaataaatatatatatttattcctggatccataggcactgtcatcctgtgtctatatggtacttcaaggtaagttaaaaaaacagctctggctgggcaccaagatctttcttctttgttaggaatgtagtcatttgtttcactgccctgatctatttcttgcagagcataatatatgatgtatcttcagaaactaacaaagtatatctaattagaactggtactctagttcaaatctttagagggaagcctcccttctaaactctggtgggcatctccatgtcacctcagttttaacaacagcctaaattatagcatatgttgagtatttaaaatgtggtctcgccatgaagacatgctcagtacaaagacccgaagaacatggctcttgatctcaactagctgaaggtaaaggcacacagacatatacaaaaatcatataaggagccagcctctaccacattggtgtgaagagaagagctgatctttgtaacccaccagaaacagatggtaagacttcattgttgaagacactgcagagacaaatcaatctggaactgagctagaagcttcctccctgctgggtagcatttataatgccagaaagtgctaccagacggctgggggagaaaaggaattaacagtcttacccaaccatgtctcctgtgtactatagtactaacattctgggtaagatgtgtcctctggtgcaacagtggcatggttattttagggtaaccaattacttctgattaggtttgaggactgctccatgagaaacaatacatacctagtgctataacatcatcaaagcctatggcaggaaggtcacaaagcctaggggcagggagcttactgctatgctctactaaatagatgtataaccaaattgctttctacatatttatgcttctatctttagagtagtgctattgtccggagggagaagcttctctttgcagtgggaaacagttgacacagagaccttgagttggtgaaagttctgagaatgagtaactagtaactagatgcaggggacatctgcatcatcactttcaaggcccagagaacattgcattagagggtgcagaaagattgtataagcagtgggtggggaagaatattgtgatatgctgtctttggatatgacatggccactgaatcatgaacacccaaaagtgaggctatctacacaaagaaagagacatgcacacacacacacacacacacacacacacacacacacacacgtagagttggtaagaaggtaagaaacaggagtagtggggagtaagaaaggataatggggaaaatatgatcataatatatcatgcacatgtatgaaattgtcaaaataactgtcttagttcatgttctatcgctgtgaagagacaccatgaccatggcaatgcttataaaggaaagcatttaattgggcctggctcacaggctcagagatttagtccatgtcatcatgacaggaagcatggcgtgtgctggccgaagtgctggagaaggagctgagagttctacatctggacctgaaggcagcaggaaaagagacactgtgactggattgggcttttgaaaccctaaagcccacccctagtgacatacttcctctaacaaggccacaccttctccagcaaggccacaccaccaatgccatttcctgaagaccaaagccttcaaatacatgagcctatgagggctattcttattcaaaccgccacagtaactaattaactcaatctgccaagtaaggagaggagagaagggccaggcattctgtcagtgctgtccatttgtgctgagtggagagcatgaaggtggtctagaacacactgcactgaggcagcgctgctctgcactgcgcttccaccttcctcggctccgcacagggtgacggcgtctgtggaggacactcacgcaggctgtaaggattttgttgacactgactacagtttcctgtcatttgacttgttgatgctgtctccataatctgcaaattgaaagtcattctaccacctacatgtttgcgccaaacttacctttatagcatcattgctaagggatgcggctatttgacgaacccctttaatttgtattaacttacctccctccagattggctctgagtggaatttaaaaaagtatttcctaaatacactgtgttttttccttctgagaagtgtgcagtccgattaaggagagataagaattctacaggcacataatagtataaaatctagagtcaaatactaaatgctcaaagctattaggacaaatcagccaaccttgttattggaaagctttcatgatgcaagcaagaggcaaacagttttctactcgaatgaagtgaacagtttagaagtccaatgggactgtggtctgtatgactcctagaatgaggagagaaaaaagagcttgtggtgagccatcagagtaagctgggtttagaagccagcatccagcagtgataaccaccatagctcatgtgttctgtgtgctttaaaacctctgctaggtcccattcattctggttcatttagtctaggaggttcttatttctatttaataccatagtggcttctatttattatcataatctcattttccaacatggctgaaaaatccaaaaaagaaggctccgctatgctaccataagatgtattatgatctcagaagcagatggttggagtcatagtcttcattctctccttgagcctcttgtgtgtctgaatagtatgggaattttcctctataaagccctcagtgaccaacctaatgaccctctgcagacacaatgttttgaaatgtttttccccactcaggtcagattcccattttctccttaagtacaataaacttgcctaggaaacacttccaacaagcccaacattgattctctggggctttaatgtgtcatgctgcccatgacactattgtctccatggcaactccctcagccagggttctcatggtcagaagaaagataaatgcaaagagattgctgttgtgacttcatggctgtgattatttcttattgagaaggagcaaatgtgagaatcagactatggtggggataattgtggaagcttaaggctacattcttaggagcctttccctgtcatctctagactttcagtttttcctcattctcttcataagtctgaacttacttgaataagtaattctttgtattgaaaagtgaaaggaacatcaccaagattctgggggcctccatctgataaagactggaaactcactggctacgggagcctcagccagtcaatatattctctgtgccacttcactcagggatggaaggaagggagtcctcactctgtcacccttaaagggtagtttgggttgagacaagatctggatagttttaatttcccaaactcccccccccaacaatcagaaattgtaacacttacattttgtacacatgcgtacactatattttaataatggtggttactataagttcttctgccgaagaagagacctaaataaacatgtttaattctgccctgtccttcaccatagccatcaactggagaaggatgccagaaacaatccaccacagactctgctgttcagagaacagacaaagaaaatacatcctctgtatctggactgtgttcagcaaatgttggtgggttgccttccatataatacttactactgtgaatccagtaacaagaaagacactctttgccttttggtggcaagaacataggttcttacatttaagagaatgtaagatggcaatatgtgagatgcacagctgatagacactgcacacacaatgcccagcgggctcagctgagtcagtggaagctttgtgaatgcccagagaaactgaccattttaggctcaagcctcatgggcaagcagaagtgattctggtaagaaatgtacccaagcagtgcaaagaacacaagaaaagaaacgacagtgtagcatcagtgatgatggccagtcccagaggattcaacagcaaatttccaactgcagatactctgttccctgtgacacatggggtctaactagagcaaatgcctacaagatttaagatgacatgcatggacattagctttaaagcggtgcttgagtcattgtcctcaggtatcttggtgtgtagatggtcagagatgattgacaggaaataagtaatgaaacttgcatgctttcagtgctaatattttagcacagctaactaatggaaactgaattccaagatggaaaaaaaatcacaattttcaaagtagtaaatacaaattcctttgcaatagaattttatatcttttacagcttatctatactgtgttttaattttattttgtgttgatggtaacttcaataattgcctgcaattggccaatcaacacagggcaagccctccaagcctggaggcacaacaatcctgagcctgtgcatacccccagacactccccttacgctgccctacaagatctctatgcagccagctcgaactgtctttgttacccatccaccatggcgggtgggtcaaagacccgagctaacatggggttgttctgtagttgcctgtatatttacctttggatttccatatgattgaattgggatctttggtagactgttatttcaacctgaagacatgacttcggtgcgttcacaaggcaggtgtagttagtttgatttgcctggcaaagtctgtatttctcacttattcctgaaggacagctttattcagtacagcattactgcttggtagcaagttttcttccagcagtgtgaacatatcagtgtagtccctttgggctgcacagtgttttctgagaaaccttgtcctagtttcgtagacatttggctgggtgggaaacgctactttcctcctcattctttcagagcacttccttcagttttgacttttgacagttggagtataatttacttcagtgtggatgtttggggttcatgttcaggctttgttggacctcctgtgtctctgatgggaaggtttagggtctgttgggactgctgcatctgagatgggagggttatctcctagatatttgaagctttcttgtcgtgacctggaatgtctcagctccaagccactacagccaggaagttctaccttgagtgggggtgcatggacatggaaactcctagcaacccagggcgataaagaccaaacacaggcatcttgtcatctttaaagatctcttagttccatgttgtaaaacttgagtcttttctttgttttccatctttacgactgtttcttaaccatcctgctatagcttcgagaccatttctttcctttcttctcctctctgctagctggctcctaaccttctgtcatcctcacttgttactcacccatacctccacctccgcccaggtgctggcctatttagatgcgtaggcccatacagatgcaaactaggaggcatattaccctgaggccatggtaaacaatagtagccttactggcattaacaatacaatagtgagctttcctgtgctcctgtttattgaagctggaggctgggcctcaaagtatttcataatggaactattttggtcccccacactttcttactaagcatcccacctgtttacctgtccttgtttaaggagactgctggaatactgtaaggattaaatgatgtcttacaaggccacactttcttgaattttttactcctttttatttttgtttttctgatggagtccttccaaatgactcatcttcatgtccattgatccttccattctgatctgccgtccaacacttatcatggatttttcagtttagtgtctgtagttttcagctctgacactcttactgaagggaccagctccccatttcggcagccacaacagccaaacacccacttgcctgaccttgtcttggtcactaagaggtcagacacctgccttgtggcaaggaaccaattagaagttagctggtggtgctatgttttacggctctgggtgtgctttacggacaagcacacagctatgatgcgcagagcataacaaccaccctgggagggcctatgggccataacaaccagttgaccaatcaacacagggcaaacccgccaagcctggaggcacaccaatcctgagcctgtgcgtacccctagacactctccttacgctgccctataagatctctatgcagacgctttgagctgtctttcctagccatccgccatggtggatggatggaaggcccgagctaacatggagttagctcgttaaacaactataataaaaccttgtgcagtttgcatcaagctttcgaatctgcttggtaattggggtgacagaggtcctgggctgagatcctagaggcctgagcttctgggggtcttacattacatgactcccagccagcatggctcatcaccagggaagggggaatcaggaccatagtaggagtcatcctttgctgggtcggggattagctgcttctgggtcactgtaaagagacaactataggaggaaaagtgaattttggctcacagtttctgagacatcctgtcatgctgggtgggatatggtggtgttcacagtggcaagagtatggagtagcaacttgtttccatcaaggctgagaaaaggaaaatagaaagattaggccagaataggaaacagctataactcccaaaggttcaaacataatgattattgagagctagaagcctcctaatggcccctcagccttaaaaataacatcacaagctggggaccgagtgttattgttttgtttaaaaagaagaaaagagaaatgttgagacatgagactataagtttattataaggcccggcagaatggggagactaagaagaagaacagggtaaatggctgaccgccatggttggtcgccatagagagacagagcggggaaacagagaggatgggtagtcagccaacccaagaggagccaaaaggaagagagtgagggatgggtggcaggaccttttaaaggaaaggttgcatatgcgcactggggttttgcacctcacaggttgtaatgcatggcgggtgagtgccccattgttagggggcggggtcagggtcatccacgtgtattgttcttacaccgagtgttcaaaacatcattttgggacaggaatgtatttcaactggagaagtgcttgcataacatgcaccaaacctgggtttgtattctcagtacctcataaactgggtgtgctggtgcacacctgtagtgtctgaactcaacaggtggattgagggcagcctgagatacctaggaccttgtttcaaatagtatagtaattaattaaacaatgactcctatgggagatatttcagacttaattcataccaaataggtatgaaaaggggggggggagagaaaaacacagaaaaggaagagaggaagaagagaaggaaggatggagggagggaggaatggagggagagatgtaggaagggacagagaaagggaaggagacctgggatgtggagaatttggagccttgtacactgtggtgaggatggaacttgatgtgttattaaggcaaataatgtacattattggggacaaatacaaatgggactccacacaatccagcaattctacttctggggattcgtccagaatccagatcttgaggagaggattgctctcacgtgttcacagcagtagcctagatgtagaaacatcccaggtgccctcctacggctgaggaggtatacttgaaatgtagtgatcacataatggaaaattttcagtccttgaagagaaggaaacctcatatgtggggacattagccactgagcaggagaggctacacaatagactgtgttgcagtagctcaagcaggcagtcacagaagcacgaggtaaactggtgattccaatggttatgcaattccattgcatcctagttgtggatgaatgccccggccctcggggctccggtaattcatgagtccgaggtggatcacgcctgcaaataatgggcgggaaagaaagagcgggaccaagcagattccattgtcaatgcccactttattgaaaccaaggagctttttaaagagaagggaggagcagagaaaaaggaggtggggggagggatgagttaattattctcaggcaggtattctgaatctcctgtgtttatctcaggcactaactgaaaggttcaggcattatgctggcctgcccctgttacctggtggaatccactcaggcaataccctggtcagcccaaggttccatgggaaagaagtctgcacacaggtgcagaggacccctttaaaagataggcccctgcccctttacnnnnnnnnnnnnnnnnnnnnnnnnnnnnnnnnnnnnnnnnnnnnnnnnnnnnnnnnnnnnnnnnnnnnnnnnnnnnnnnnnnnnnnnnnnnnnnnnnnnnnnnnnnnnnnnnnnnnnnnnnnnnnnnnnnnnnnnnnnnnnnnnnnnnnnnnnnnnnnnnnnnnnnnnnnnnnnnnnnnnnnnnnnnnnnnnnnnnnnnnnnnnnnnnnnnnnnnnnnnnnnnnnnnnnnnnnnnnnnnnnnnnnnnnnnnnnnnnnnnnnnnnnnnnnnnnnnnnnnnnnnnnnnnnnnnnnnnnnnnnnnnnnnnnnnnnnnnnnnnnnnnnnnnnnnnnnnnnnnnnnnnnnnnnnnnnnnnnnnnnnnnnnnnnnnnnnnnnnnnnnnnnnnnnnnnnnnnnnnnnnnnnnnnnnnnnnnnnnnnnnnnnnnnnnnnnnnnnnnnnnnnnnnnnnnnnnnnnnnnnnnnnnnnnnnnnnnnnnnnnnnnnnnnnnnnnnnnnnnnnnnnnnnnnnnnnnnnnnnnnnnnnnnnnnnnnnnnnnnnnnnnnnnnnnnnnnnnnnnnnnnnnnnnnnnnnnnnnnnnnnnnnnnnnnnnnnnnnnnnnnnnnnnnnnnnnnnnnnnnnnnnnnnnnnnnnnnnnnnnnnnnnnnnnnnnnnnnnnnnnnnnnnnnnnnnnnnnnnnnnnnnnnnnnnnnnnnnnnnnnnnnnnnnnnnnnnnnnnnnnnnnnnnnnnnnnnnnnnnnnnnnnnnnnnnnnnnnnnnnnnnnnnnnnnnnnnnnnnnnnnnnnnnnnnnnnnnnnnnnnnnnnnnnnnnnnnnnnnnnnnnnnnnnnnnnnnnnnnnnnnnnnnnnnnnnnnnnnnnnnnnnnnnnnnnnnnnnnnnnnnnnnnnnnnnnnnnnnnnnnnnnnnnnnnnnnnnnnnnnnnnnnnnnnnnnnnnnnnnnnnnnnnnnnnnnnnnnnnnnnnnnnnnnnnnnnnnnnnnnnnnnnnnnnnnnnnnnnnnnnnnnnnnnnnnnnnnnnnnnnnnnnnnnnnnnnnnnnnnnnnnnnnnnnnnnnnnnnnnnnnnnnnnnnnnnnnnnnnnnnnnnnnnnnnnnnnnnnnnnnnnnnnnnnnnnnnnnnnnnnnnnnnnnnnnnnnnnnnnnnnnnnnnnnnnnnnnnnnnnnnnnnnnnnnnnnnnnnnnnnnnnnnnnnnnnnnnnnnnnnnnnnnnnnnnnnnnnnnnnnnnnnnnnnnnnnnnnnnnnnnnnnnnnnnnnnnnnnnnnnnnnnnnnnnnnnnnnnnnnnnnnnnnnnnnnnnnnnnnnnnnnnnnnnnnnnnnnnnnnnnnnnnnnnnnnnnnnnnnnnnnnnnnnnnnnnnnnnnnnnnnnnnnnnnnnnnnnnnnnnnnnnnnnnnnnnnnnnnnnnnnnnnnnnnnnnnnnnnnnnnnnnnnnnnnnnnnnnnnnnnnnnnnnnnnnnnnnnnnnnnnnnnnnnnnnnnnnnnnnnnnnnnnnnnnnnnnnnnnnnnnnnnnnnnnnnnnnnnnnnnnnnnnnnnnnnnnnnnnnnnnnnnnnnnnnnnnnnnnnnnnnnnnnnnnnnnnnnnnnnnnnnnnnnnnnnnnnnnnnnnnnnnnnnnnnnnnnnnnnnnnnnnnnnnnnnnnnnnnnnnnnnnnnnnnnnnnnnnnnnnnnnnnnnnnnnnnnnnnnnnnnnnnnnnnnnnnnnnnnnnnnnnnnnnnnnnnnnnnnnnnnnnnnnnnnnnnnnnnnnnnnnnnnnnnnnnnnnnnnnnnnnnnnnnnnnnnnnnnnnnnnnnnnnnnnnnnnnnnnnnnnnnnnnnnnnnnnnnnnnnnnnnnnnnnnnnnnnnnnnnnnnnnnnnnnnnnnnnnnnnnnnnnnnnnnnnnnnnnnnnnnnnnnnnnnnnnnnnnnnnnnnnnnnnnnnnnnnnnnnnnnnnnnnnnnnnnnnnnnnnnnnnnnnnnnnncaatatatatatatatatatatatatatatatatattattttccctataatggaataatacccttactagatagcatcaggctaacaattaaacagctcaaggaaagttttgggttatctcctttggaattgttggccaatgaggttccatttctggttattgtcaatgatgcttgattactctccagattaggtcgtgatatcctaacactgaagatatcatacactctagtcataggatgtgtaaaaatcaagttggttctcatctcgaagctttatccctactggatagatttccaggtgctggaatgctctctgaatgctaccacagaagaaaagtgatcataaaccaatcttatccacctgttacaaagattacaggcctggaaagacatgtccactggtgcaataatagcacaaatatcatgaaagtaaccaatcacttttaggtttgatttaaaacccatttcacaaaacatctgttctacaagatgaaacccactactggcaccattattgaaaggttcaggcattatgctggcctgcccctgttacctgggggaatccactcaggcaataccctggtcagcccaaggttccatgggaaagaagtctgcacgcaggtgcagaggacccctttaaaagataggcccctgccctctctctctctctctccccctgttcctgctctctgtcccctctctctgtttccccgctctgtctctctatggcgaccggccatggcggtcagccattaccctgttactcttcttagtctacccattctgccagtccttataataaacttatagtcaatatgtctgtctcaatatttctcttttcttctttttaaacaaaagaataacactaactaaggaaatgggggaggggataggtgttagttgcttctcacgcagatatccagaatctcctgtgatatgccagactttctggtatctaactaggcatggggtcgccaaggctggcttctgacagatgaacactgtgtcttctattaacgatgctgctcactgcaaatgggcaaactactaagcacacaaacctcactatgaagtgttattacaattttaataaaaaaaatctgtgccaacatttcatttacgtgatgaagggacttctggaacaatgtagctagttcagtgaggagtcgagaaatagggtttccattgtgacagtaagagtgccgaataagattaccaagctgcatgcaaatatctggaaggtttccaattgtttgtcaaaattgtatttccaaagggactcatggctctctgatatacattctagaaaacggtctactatgacaataaaaagtcagattgttagacccccgaaaactcaagtatccggggtcccaggccacgttcgaggtcaccccaatcaccaggcagattcgagagcttgctgtaaactgcacgaggctttattgtaatttaacgagctaaccccatgttggctcgggtctttcacccacccgccatggcggacagctagaaaagaccgtttgaagctactgcgcatagatctttatagggcagcataaggggagtgtctaagggtacgcacaggcttacgcacaggctcaggattggtgtgcctccaggcttggagggcttgccctgtgttgattggtcaactggttgttatggcccataggccctcccagggtggttgctatgctctctacgtcattgctgtgtgcttgtccgtaaagcacacccagggtcgtaaagcatagcgccaccagctaacttccgattggttccttgtcacgagacaggcatctgacctctaagtgactaaggtaggtttatggcaagcacgtgttcggctgttatggctgccaaaagggaagccggttccttcaagataagttatttttgtcccatttcaagttctagataatttaaatttttctttattgaaaatagattcttttcccatacaacatatacttattattgtttccccttcctttactcttcctagctcctccccacctcctctcccctccaaatccactccctttctgtctttcagtcttccaagagagaacaaccaaaggtgacaaaagttaatataataagatgaagcaaaaactatcatattgaagttggcacagcaacccaacaggagaaaaggagtcccaagagcaggcataagagtcagatacccactcactcttgaagtcaggagtcccataaaaacaccaagctaatagctataataagtacacagaggatttggtgcagactcatgcaggctccatgctttcttcttcagtcactgtgaactcatatgctccttgcttaggtgattcagagggtctttttctcctggtgtcctccagtccctttgactcttacaatcgttttgcatcctcagagctcagagaggaaggatttgatggagacctccaatttaggttctctttccacataacatctagctgtgcgtatctgctgcccgaggaagtctgtctaatgatgactgggtaaggcaataatccatgagtatagaaggatatcattaggaatcattttattgatttttttaagaccaactgtgtttggttttacccgaggtctctgggctatttagtctctggttcttggttacccaagcagtgttgggtatgaattccttctcatggagtgggccttaggtcaaattatacaagttctgtgtcaccattgctctagcatattttgtaggcaggacagattgtaggttaaaggtttttgtaactgggtaggtatccacatttctcttttggtaacctgaaaagtatcttcctgcaccaaagagactagatggtaggcgtgaatgttccatgcaggcaccagctccacttctctatgctcaatgagtcgtgtgggtgttgtccttggcaatggagccacattgccagtttgcagagaacaaccttttgttttagcaaacagtctggcttgtttggggatttccatgagatacccttggtcaacaactcaactgaatgtaaactagccctgccactggaagtctcgcctggttacaagagatggccagttgagactccatataccccattactaggattcctcattaggatcaccttcatagattccaggaagtttctactgcagtaggtttccacaaaatctcccaattccagccatctctccctacattccccccctccatcctatatcctcccaccacttgattcccccactctcacccccagtccacccataaaaaactatcctatttccacctcccagggagactcctgcttctccccagagccctcctatttacataatatgccttcctacataccatagcttggttatcattaacttaatggctaatatttccttataagtgaatgcataccatatttatctttctgggtatgggttacttcacttcggatgattttttttctagttccatcatcttttcttactccatctagtgcctgtaaatttcatgatgtcatttttttgacagctgagtaatactccactgtgcaagtgtaccgattttctttatccattattctgttgagagccatctaggttgttttcaatttctgactatcatgaacaaagccacaatgaacattgttgaacaacgaacattctttgggtatgttcccaaagagtggtatagctaggtcttgaggtagatcgattcccaattttttgaggaattgtcatattgacttccatagtggctgtacaagtttgcactcccactagcaatggaagacctttccccttactccatatcctcatcagcataaactgtcatgtctgtgtgtgtgtgtgtgtgtgtgtgtgtgtgtgtgtgtgtgtgtgtgtgtttaccttagccaatctgacaggtataagatggaatctcagagtattttgatttgcatttccctggtggctaacaatgttgaacatttccttaagagtttctcaaccatttgagatttctctactgagaattctctgtttagatctgttcctcatttttaatattgaattctttgggtatttgatatctgctttcttgagttctttatgtactttggatattagtcttctattgaatatagagctggtgaaaatctttttccatctgtaggctgcttctctgtccaattgacaatgttttttgccttacagaagctttcagtttcacaagctctcatttattaattgttgatcttagggccttgctattggcatttcatccagaaagtagtttcctataccactttctcatctatcaggttccatgtatctgtttttcttttttgcagattttttttatttgaattagaaacaagattgtttcacatgacaatcccagttccattgtccctcctgtcctcccctactagcccccaactaaaaccctacctatcacatatcctttctgcttccctggatggtgaggccttccatagggtgtcatcagagtctatcatatcctttgggataggacctaggcccacccccatgtgtcttggcccagggagtattcctctgtgtagaatgggctcccaaagtccacacttgtgctagggataagtactgaaaaactacaggagatcccgtagatttccgaggtttcctcactgaagcccatgttcctggggtctggatcagtccaatgctggtatcccagctatcagtatggggagcaagagttccaggatgttcaggtcagctgtttctgagggtttcaccagcctggtctggacccctttgctcttcactcattcttctttgcatctggattccagttcagttcagcaatttagttgtgggtgtcagcttctacttccaccagctgctggatgagggctatcgggtggcatataagtcagtcatcaatctcattatccggggagggaatttaaggtagcctctcctctattgcttagattgttagctggtgtcatctttgtagatctccagacatttccctagtgcctgatttctctgtaaacctaaagtgtctccctctattatggtatctccattcttgttatcttctattcttcccctgactcaacctttctgctacctcatatcctccgcatcccaacctctactctccttcgcattctcctagctccctccccccacttcccatgctcccaatttgctcaggggatcttgaccctttccccttctccaggggacgatgtatatctgtcttagggtcctccttatttactaacttctctggcagtgtggattgtaggctggtaatcctttactctatgtctaaaatccacatatgagtgagtacatatcatgtttgtctttttgtgattgggttacctggctcagaatggtttcatcgagttccatccattttcttacaaatttcaagaatccattgtttttttctgctgagtagtcctccattgtgtaaatgtaccacattttctccatccattcttcagttgaggggcatctaggctgtttccagtttctggctattacaaataatgctgctatgaacatggttgaacagatgtccttgttatatctgagttctttgtacatttgggagaccatccctctgtcagatgtggggttggtgaatatcttttcccagtctgtggactgtcgttttgtcttgctgactatgtcctttgccttacagaagcttctcagtttcagaaggtcccatttattaattgttgatctcagtgtctgtgctactggtgttatgttcaggaagcagtctcctgtaccaattaattcaagggtatttcccactttatcttctagtaggttcagtgtggctgggtttatgttgaggtctttgatccattttgatttcagttttgtgcagagcgaaaggcttgggtcgatctgtagtcttctacatgtctgcatccagttatgccagcaccatttgttgaagattttctctttgttccagtgtatacatttggattgtttgtcaaaaatcaggttttcgtaggtgtgtgggtcaatttcagggtttcaattctattccattggtctacctgtctatttttgtgccaataccaagctgttttcaggactgtaatagagcttagagttagggatggtgatgcctccagaagttactttattgtacagggttattttggctatcctgggtcttttgtttctccatataaagctagaacttcaaggacaatattgaagaggtatggaagagtggacagccttgtcttgtacctgattttagaggaattgcattgagtttctctccatttaatttgatgttggctgttggcttgctgtatattgcttttattatgttgaggtatgttcctgttatccctgatttcttcagaaccttaatcatgaagggatgttggattttgtcaaaggctttttttgccatctagtgaatgatcatgtgatttttttcctcagtctgtttatatggtggattacattgatggaaatctgtgtcttttttataggcgagttaagaccattaatgttgagggatattaatggccattgattgttcattcttgtttggttttgatttggtgatggtggcgaaattacgtgagggattctatccccttttccttttggctgttgctaaagtgggattatctattgcctatatttttctggttgtagttaacttccttaggttgcagttttccttccatgttgcagttttccttcaagaactttctgtagggctggatttgtggatatgtattgtttgaatctggttttgtcatggaatatcttgttttctccatctataatgattgaaagctttgctgggtatagtagtttgggctggcatccatggtctcatagtgtaggtagaatatctatccagaaccttctgtctttcagaatttccatggaaaagtcaggtgtaattctgatagggttgcctttatatgttacttgatctttttcctttgctgctcttaatattttctctttattctgtatgtttggtgttttaattattttgctccatgtgttcctggcgattacctttgagatgctggagtcagaaaggtcaggagtacgtgggtgtaactttgtatataactgaaacatgcaagttctaacagggggtgtgaaacaaagttgacaatttgtggtgatcacttccagatgggaatttttcctctgtggttgaacattaattgaactgggaggcttctcctcttctctctggggaaaactaagttctgggcccagcaccccaaatgtctgccatccatgtgtgtatatgtgtgtgcacatgtatgtgtgcgtgtgaccctttatgtgcacacgtgcagactagtggctaaagctgacagccttcctctattgctcttgacttggaatagcatcactcattgaagctagagtggctgagttagattggtcagctggtgagtccctgggatgcatgcatctggattttatataggtgctgaggactctggcctcatgctcaaatagcagacaccctggaccacctcactcgtcctttgagaactctaagggattttctcatatcctctttgagaccctctatcgttttcatgaagatgcttttaaggtcattctcttctgattcatctgcattgtgatgttcaggtcttggttgtgtatggtccctagtctctggtggtgtcatattgtattttctgttgttgaatgtgcttttacattgtcctcttctcatcctttcttctggtgggtgtagcaggagtctcttcctctcctggtgggtaggggaccaaggttcccttctggtagatgcacagttccaagactctgatgtctgtcctcttcttagggatgaaggtggcactgttaccggggccctggcagtttatggctgttttggatccgccaccaaattcggatctgatgagcagaccccaggcatcaggtgtccctcgagcaggcccaaagaactgtaactggaaacagcccctggcctaccttggccggagaatggaggtggaactgctacctcatgtatctggttttatgttgtgttttttatccacttggacttgagttttgtgcagggtaatatatatggatatatgtgtatttttctatatgcagacatccagtttgaccagcaccatttgttgaaggtgattctgttttccagtgtatattcctgtcttctttgtcaaaatcaggtgttcataggtatgtggacttacatctgggtcttcaatttgatttcattggccaatatgtctgtttttgccaatacaatgtggtttattattattactacagctctgtagtacagcttaaaatcagggttggtgagacttgcagaaattcttttattgtacagaattgttttagctatcatggatttttgtttttccatatgaagttgagattgtcatttcaaggtttgtaacaaactgtgttgggattttgatggggattgcattgaatctgtagattgcttttgctatgactgccatttttactctgtcattcctactgatccacgagcatgggacatcttttcatcttctgatatattcttcaactttttcttcaaagacttaaagcttttatcatacaagtctttcccttaaatggttaaagttatgcccaagatattttatattgggatattgtgaagggtgttgtttccaatttctttctcagtccatttgtcatttgtacatggaatttttttgagttagtcttgtatccagccacttcactggaggtgtttatcatctgtagggattccctggtggaatttttatggtcacttctatatacttttatatcatctgcaaataatgatactttgacttcttcctttccaatttgtatcaccttgatttccttttgttatcttattgctctagctagaactttgagtcctatattgaatagagatggagagactcgacagccttgtctcattcctgattttagtggaattgcttttgtgtttttcaccatttaatttgattttggctataaactttctgtaaattgctttagttatgttgagatatatcctttgcatccttaatctctccaggacttttgtgtaatgcctgtactatgactaagtctaatggaatctccacttgtggcatccttgccacaactaagtggagtattgggtaaaagcctggagatttacttaaaaaccgggccgtctggtagcttgtgctaagagaatgtgtgtgggtctgtgtttttttgcagggagggagcagccttgtatatagactcacagcacagtgggaaaacccaggtgtaaaagctcgtgtttttgatgccagcagggcaaggccggggctgtaatccaggactagaaaacagaatgcatctgtgtttatcaattcacggagactctgtgggggctggagcccaacatctctcccaacacttttgtcataaagggctattggaatttgtcacaggcattttctgcatctaatgagatcatcttttattttttttctttcagattgtttatatggtggatcacatttactgatttttgtatattgaaccatccctgaatttctgggatgaagcctacttgatcatggtggatgaacttgttgatgtgttcttggactcagtttgctagtgttttattaagtatttttgtatctatgttcaggagagaaattgatctaattctctttctttgttgagtctttatgtggtttgggtatcagagtaactgtggtctcataaaatgaattggacagtgtccctcctgtttctatcttgtgggataatttgaggaatattggcattaactcttctttgaaaatctggtagagttctatgctaaaaccatctggacctgggctttttgttttgttttgctttgttttatgaagtgggggggggggattttaatgactgcttcttatttcagtgggacttataggtctatttaaattgttatctatattgatttaactttagtaagtagtacctatcaagaatattatccatttcttttagattttccaattttgtagagtatagtttttaaagtatgacctagtgattctttgaattttctcagtgtctactgttatgttccctttttgtttctgattttgttaatttgggtattctttctctgcctcttagtaagtttggatagtggtttgtctatcttttttattttctctaagaaccaactctttgtttcattgatttttttgttttgttctctttgtttctattatattgatttcaactatgtttgattaattcttgctgtctactcctcttgggtgtgcttgcttctttttgttctagagcttttgggtgtgctagtattaaatctctccaattttcttttataggcacttaatgctatgaacttgcctctcagcagttcttttgttgtgtctcataaggttggatatgctctgccttcatttcctctgatttctaggaactctttaaattctttatttctgtcttgacccatttttcattcagtagagagttgtttggtttccatgaatttgtgaactttctgttgtttctgttttggatgtctagctttaacacatggtggtctgatgggatatagggagttatttcaatattattgtatctgttgaaattgaaacttgctttgtgttcaagtatgtgattgattttggagaaagttccatgaggtgcagagtagaatgtatgttatttgtgtttgggtgaaaatgttctgtaaatatctatttggtttataacatctgttagctccagtatttccctgtttagtttttgtcttggtaacctgtacattgatgagggtgggggtgggggagtagggggggcggtattaaagtttcgaactatcagtgtgtgagggtcaatatattatttaaactggagtagtgtttcttttccaaaatgggtgcctttgtgcttaggtcatagatgttaagaattgcaatgtcttcttggtggatttttcttttgataagtatgttgtgtcattcctatctcttttgattggttttggtttgaattctattttgtccatttttatggaatatctttttccattccttgacattgaggtaatgtctatccctgatgttaaggtgtatttcttggatgccgcagaaagaaggatcctgttttcacatccattctgctagtctatttctttttattgaaggaattgagaccattgatattgagagatattaatgaccagtggatgttgattcctgttatcttgttgctgttggtggtggtttgtgtttcccttctcttatttgcttgtgtgagattattcctgtgttttcatgtatgtaaaatctcttttgtatttttcctttcagcactttctgtatggctagatttaaagatatatattgtttaaatttgactttatcatggaatatattttctccatctatcatgattgaaacttttactgggttagtagtctgggctggcatctgtgatctctttaagtctggacacatctgtccaggcccttctggcttttagagtctccattgagaagtcaggtgtaattctaataggtctgactttatatgttacttggtgtttttccattgcagctttaatattctttctttgtttagtattttgattattatgtggcgaggggattttcttgtccaatctatttggtattctgtatgatccttatacctttatagacataaatatctccttcatcaggttagggaaattttcttctatgattttggtgaaaacattttctgtgtctttgagctgttatttttctccttcctctttacctgttattcttaagtttggtcttttcatagtgtccctgatttcctggatgtttgtgtcaggagttttttagattaatttttttccagatatatccatttcttctattgtgtcttcaacatctgagattttttctcttccatctcttgtattctgttggtgaagcttgcttcttgtcatttgtgtttgaattcctaaactttttctttctatatttccctcagtgtgggctgtctttattgattctattttaaatttcaggtcttaaacaggtatttttatttccttacactccttttttgtatttttctggatttaaaggttttactaattttctctttaggtacctctattatattcataaagggtgttttaaggtctttttcttgtgcttcagcaggggtgcacaggaggtgtggtcagtggggagggaaagccacagctggggttccattgcagcaacagggacaagactgtgggattgggtctggggctcagagacaggagaaggtcagtgacctgattttctgcaggtgtggcctatctggataaatttttgctgattactacttttgctgccataaattaacaatgttatttttcatagtgaatgtgtttgtgtcttcagacccacaagaaagccaatgttgcatgttttctgctaactgaatttgtttaattaacttccttattcagattttcaagtttgaattagacataggctaattagacattagtgtatatacaaaccatggcatcaacactaatggtgtcctaatttatattatggcaccaattcaatggcagttattaagcatagcccatgacctgtgtcttcatgttctatggacgttgttctattagtctgatttatttacataagtgcaacaataggtgttgaaacagcaacacttttgttatattgtcagtaaaactaaagagaaagtggcgtacttaatttctaactggaggccataaaacgaatctgagagtctgggctgtggttccaatgacctttattatatgagatattatctttatatcttgtattaatacaactattcccagatgaaggaaataaaacttgcactaagtttgagtttcagtccctgtaacagaaagaattctgatttctgggggtctaccagttgatgaggttccttgcctgccaagaagtgaccttttatacatcagcaactagccaagtgttcctgagatggctttacaggtgtgttgattccacatagaaagtacaactctgcttctaggtggtgggccccatcatatttctgaagaaatagaatttattctccagacaccattaccatcacagcttcagttgcatagtcagttgacctgtctatttagagcctgacataaaggctgatttctaaaagtactgtgtaaatgctgccagaggctggggggacagctcacttagcagagtgcttgccttgtgagcataaagaatgaagttctatctccagaatccttgtggaaaatactgagtgtggaggtgtgtgcttttaatccctacctctactgggaggtagagacaggcaggcttcttgggctcaatgggcaactagtctatcctacttagtgagctccaggccagtgaaatcaagtcactcttgttatgtttaaaagtcattctttgaatgatctttgttcatcttttacttttaactgatttacatcattatgtagaaaattatttttcatgtaaagtgtattaattgggtgttggatttttaaagtcctgtctgaatttcttttatttggggtatggagaatatttgcatttaatgtaattattgacaggtttgtttggttttgaattagttaaccttgcttctagcgattccagttttctgttttgttggctaattagccaataaatgattgctttaggattcggtgactgctttagggttcagtgactgctttagagttcagtgactgctttagggttcagtgactgttttagggttcaatgattgcctaagagttcaatgactgctttaaggttttgtgatttctttagggtttagtgactgctttagatttttataggatgtatgtttttaattgacaatataccactagccagtgtcactgcagttacttcatgaatgtttaagaaccttctgaaagcatttttccctttctgctttctcagcctttatgttgcataggcaaatatttattctcagtagttatgggtgctgtgcatgttcaagagcaagatgatggcagacctaagtctggtagatgacaactccctggtcatatccccacaggttttccttcatgaccttgacgctcaatctgtactttgaccttggccttccagccttgtttgagaaagcctgatcttcaggcaatttctaagttaattccatccaaacactgtggctattactactgaaaacggttataattttaattaagacttgctgagaacttactagcatttattgctttgcaatagtggtttgtagtcattaagtcacttatctgtcttgtatcttcaaaggacagagaccggggagagaactaagttctcttttgtctctttttgcaagtacactaaagccaccactagggctccatcctcatgacataataagctctcagaggctccatgtctgaatagcagctcattggcatctccaatatggattttgaggggcacaaacatgtagtgatgatatgttattaatgtcaaaatgtgttaccattttgtttagttatctctaaagagatttgcatagacaaacagcacttattacccatgtgatgcccatttcagcttctcttcatccctttatataaacctaggtttctatctggtatcacatcctgcttgaaagattttctttaacaaatttgttaaagcaaatatggggtggggtgacaggttcagcttctgtgtctgtaaacacctttactttgagtggtgttttactgggtataagttaaagctggttgtttcatttcttttggaacttccaaggcctcaaacatcgaatctactgtcattcttgtgtttaggttcttgtgtacacagcatgtcccttgtttagctgtttttaggttttgtgcccatccttgattttcagctgttgctgatgatgtgatgattttattttcttcaagtttcttgtgcaaggcatttactgagtttcttatgtttgagttatcattatattttgaatggttcttgttattgttccatgaattacataagttaggccatttgaagctcaccaacatctcttgggtgcttatttcattttttatctgaagctcattttgtatgatatttaatggtctgtattgaagttcaccattcttgtaatccagtctgccatggttccagtcagtacagcattcttctctatgttggaacttttcaatagctttgcctctatttgaatgcccaaccatctagagaataattattagattcatttaaatgtccttctctggatcattttggattgattctgactgattttgctccccccatgggctatattctttgactcaattccagacattatgatagtattgtaaagtattcactttgaaccatggccacataattttagtttatctctacctctgcctcccagaattggaaccacaggcatacaccatatacccaacataaagccagtctaaaacttaaaccagcacattggggtgaagctcagtaacaaattggatgcttactatccatggggctcagtattgaaacctgagtgccaatcaaacaaaacaaagcaaataacaataaaacactgtgcatatgacaataagcacacacacccattcaacttcttcaaattcaagtataatacatttcttacatcaactaatcaacatatcaatttgttgtaggagttacattaaattattgtccttttacctccagtttttacacatgttgtccccaacacttgaagtggcaactcccaatctatttagttaatttcctatgctttatctgttaattcaaatatcacttcctcagcactctctcttgattcctagaatgagttctgatcactcctctttggttctcagagttccttttttcctatgcaactcaatttcttagagtataatgtgaggttctttttctcttgtcccatctgatctcacagcccctgaaccccaaataaacacacagatgctatattaattataaaactgttggccagtggcttgggcttcttattggctagctctgtcttaattgttaacccatttctattaatctaagtatttccacatggtcttatcttactggagaagggtccagacctctaactactttggtggctcacatggagactacctctgcttatgtttcccagaattctcctcatctcctagtcctgactatctccctgcctctattgaccacagtgttttattcatcaaccaataagagatacatatacacagaaggatattcccccatcattagagtttggtttttacactaaatcatgacctcaataagggaaggaacatcagtacacacacaaatatatacatatacacacgtatctacatttggatatacacatacatgcatgcacatacgtgtgtgtgtgtgtatgtatgtatgtatgtatgtatatatgtatgtatgtatgtatgtatatttaaagctatgtctgtcatagtgaggaacccatgaaagcagtaacttaaattcactttagatttatcaagctgactatatatcaaggaaatattctccaaatattacttcaaagaaccccagtgagaagtgaggatactaaaatgtatgatggaaagcacatgagctttgacaccagacatatgtgggtttaaattgctgtgtcatcacttattagctgagtgacctggaagagctgtttgctttctgagtctcaaagtgtcagtggtattgttagcacagagacagtaatagcttcttcctggagttgttatgacaagtgaatgaggtgaactatataacactcttaatataatgcttaaaatagagagggctgcagggatgctgcctgcctctgttcatccacttaccactccactctcaacgtccttggtcaccttctcctgagggaattattaatgctaataagtacagatataacacagaaaaaaacagttcctttctctagattgatggcaaaaatatggacaaacctatgtataacataaaaccatagaaaatgagaattagaggagactcaagagaaagacctcattgtggtgaagggattgaaattcagagaagttagctatctgggatcctggagtaagcaacaaggatctggaaggaagaacacccctaaatatcttaaggtgactgaggccatgcaatgacaaactcatgttgagacctgaaagatgacacacatgtgacagccactgacaaagaaggtgcaggatttaaagcccattctgctgacctctccatttctgaaccccatgagtggatgtgaacgtgtcaatgggggtactgttgtccagtggtattctttttgtggtttctgtttagagtagtctcttagttgttacactccactatatcgaactctgtggaataaaactcatatgaggggcaggtcaggggcatatcagcacccacaaaggtttggcccatattttgtactgttggggaaggtggctaggaagggaattgtgaactacatagtgtcaggtggcccttatatgaatcaaggcattggcatcttatgactgtgtgctgttcttttgagttgatctctgggacaagtgccagaaaaataaatgagaaccagactccaaattaaacattgccttatcattatgtcacagacaaaagcacgaagataaaaatctcaaagcaaaatagatggaggacaaaggggaaatagtggcagctgaaaccatagtttggagctaagaagtggaacaaatgaggttgaccatctgctcagaaggagagggagcctcagaaaaccactgggctgggacctggtgatgtgcctccatcagtcatggaggactgggaggagtagctgctctctgtatttcagtgtcctccattaaacgggaacgtcacactcttgccattttataagaccagtacaaattgttctctaacagctttccgtagttttttacctattgttagcatccaccttccaacttccatgatttactaagacccacaggaaggcactgcctttgtaccttagcagaaagtcacatggcaggaagaatgcacaattcttcccaagccaatttaccattctcttggcctcagtttactgaattggtggtgagaattaaaatgatattctgttcacagagtacttaatgcaatgtttaatacttagtattgttaaagtatgtatttctactttaattgaactttttatttattacctcgcatatgtattttagagttcatacagtggcatgcacgtaagggtcagaggacagctttgtggagttgggtctcttctaccttaatgtgggttctggggattgaactcgcatcaccagtcttgcacgcatgcacatttacctgttgagtaatcttgttagcccaaactatacattttaaacatttatacatatatacaaatccatgcagcatgtatgtcaaagactaatttagacgacaaatgaaggaagcaagaagatgataatggaggtactggaagaaggaagtctgtgtagttagaagaaaaaatgctgacttttaaaataactatgagatactttggttttcatcggcttgctatatttgattttggagaagcataccctaaagtccaaattctccttcattggtagtgactttgctgctagttaatgtctgcatggtttctacacagctttctttgtatgctgtatactttaccactgatggaaaatgaaataaataataagctgggtgcctgtcagtaagtcctgtgggactcaaggatgctggggtgaaattaagttgtgtacaaatctgtcagtgtctcaaggagtcaatacaatggtgtccccgaggttatctttttaattggacgtttattatatttatctctagggggctatggtagtctttcagcttatcactctccaaattaacacagtttttgtatagagcccaagacctaattaataataaaaatttaggaaaatgaaatcagtgatgggtgataaaggtttcaaagcaaagttgcccacgagtgctcaggcaaaagaaagtgcctgccccgatgtgccttccttcgggtttcagatgcggactttgctgtggaatttgatgagtctccagccagtcaacctggactattaaaaaacatttttcacccatttagcccttgtcaccaaataaccaccccccctccccagtatctctgggtttgaaacttgggaaagtgttggaaatgaggaagagcgagcctggaaaccaaacattaacatgtgtaattttcatattgtacatggggttttcccggggcattagaaaaggaactcacacagaagccatctgtatgaaaccatcagacaatgattatatcaaactaacatatccctcaggcctcacttccaaaaccttttctagtgtcttctcagatgaactgtttgttttatattttaactctctcatttccctttgttctttatctggagagctgttctctcccattgtgtgccccaagtcctgggtcttgatattttacaaatctcctcccattttacagcccttccactttaggagtggtgaaggcagaggagacctggttccctctcttctgtgactctttccttcaggtggtttttaaggtttcttcccaccagctgtttcttggcttgctgccttgctcctcttcattcctcactgccatccttttgtccctttcacagactcttggagcatgaaaaggagaattgaaactgaagataaaccaatgggcacttttaaaagagcatatggttattctttaatccataatgccttttcgtcacggttaatatcttaaatacaaaagtattggttttgacatctgtgaagattataatactaacatagattttaagaacagtttctataagatgtgtcattaatatatacatctgcgtatatttgcccgtctttgattcctcctaatgtaaacacttttccacaattgtattccttaagctgtggagtaagaagttgataaaagctggtacactaagcttgtgggatctgtggccatatgggaatggtaaccctgaacagtggaggcttgacctgggtagctccacacctgccttccacaagcagacaataggtaattggttgctaattcacctgaagcacaacagaagttagtaacaaagagcatcctagacaacaaacagcccccactctgtgaatgcaaagaggctcatagcacacagaggacctgagatatgaattcaaatccaccacagccgcttgggttctctccaggcttcagtttgttcttctataaaatgaacacattgatgaaggtgctggtcaccattctgagggccagtgaagaggaaagacactctgtgttacacccactctgtgacaaggtacagatgatcaagtgggctgtggtggcatctactgaaatcctagcactcaggacatggagacagaaggatgagaaattcaagaccagcttgggctacttacaagaccatgtttcagtaaaagaaaaccaaaagaatgaaaatacaggttagcatgaatattcaggaaatgaaataatatgaaattctagtttctctgttcatcaaagttggaaaagccgtgattctagtcatagctattattctgttaattttcttcatgggaccctggcatctttgctccagtgtgttatttgttgatttatcttatgctgtgattattacaaggaaataaatacatgattaaaagactggagataaatagcatttcttagtttttctatattggagggaggggcttagaggctgtctttggctggcatgggtggagccctcttctgaagcatcttcttcatagaaaacacctggctccaacagtagcttcaggatagccatcaagtcaacactttagttggaccttttagattgattcaggttatgggactgatgaggattgagggtacttgtaactcctcgtgtcacccttggttgacactcagaacatagctctccttgcaacagtcctgaagatggaaatgatcaacaggctctctccaagccacctcaaattactcttttggttttttttctttatagccatctgtttgcacctgtcttcttctatgccctcatcttgcaaatctgcaaatgattaactatgtcatcaaaaggacaactttcttctaaagatactgtctttcttaaggtttttatttctgtgaagagacaccatgaccactgaaactgttataaaggaaaatgtttaattggggatggcttatggtttcagtggtttagtccaccattatcatcacggtggggaacatacggacatacaggtagacatggtcctggagagggatctgagagttttaaatcttgatccacaggcaacagaaggagagaccactcctctgggcatatgtgagacctcaaagcatgcctccacaggtacaccctttctttaataaggctacaccaactccaacaaggctacacctcctaatagtgccactccctaggagccaagtattcaaacacatgggtctatgggggctatacctattcaaaccaccacagattccttctttgccagagatctaatgagatttttattctccattgcacaattggaattttatccccaggcaatgcagacaatacctgtgtgggcattccagtatctcctggttcagttctatacagtagctggtcctatgctggcacgatttagagaagaaaacatgatgaacagcaaggtaaatgattaaaaattatcatgtaagtgtgtgtgtacatgtgtgcaaatttgttccttttaccctgcatccccacatacatggatggtctatggcttttgttcagagcattagcattatcgtatgagttcctggtagtaacacaattactatacagttagtgacataacataacacaaaggcattgaaccagtagcagagtgtatgagttcctgtgcctgctgtaacacaattactaccaagctagtgactaacataacataaaggcattgttcttcaaaatggcaaagtccagaatgtatggcacagaactagaaccaacatttttttttcagggccattttctcactggagactttggggcaaatcctgctctttgccttttttgtctcagaagctgctcatgtttcctcagatcatgaacctcttcaccttcagatctagccatgtggagctgaagtctaaaggtgcatcttactgtctcatctctgatcctttttcctccttccacgactcttgtgatgactttggctttatttagagaatccagtaaattggctgtttttaaattcaactcataaacaatcttaatttagcatgcaacctatctttcttttttattattattgtaatgttacatagtaagacacagatactgcctttggggctggggaacattgtgccaatcacagaaaagcaaaacagtctaaaaatacaagtattagtgccattgtttccatactgtttaatattcatatgaattgatctctgaaagatgaggatcctgcagatgagagaggtgcatgaatactgctgttgtggaatatttaactatgtaaagatgtattacatttgattattctgtggactattattttaactgtgcaaaggtgtgttgtatttgtttctgctacatttgtttaatcatgaaaagatgtgttgctgtttcactttgcctgcctaaggcacctgactgttctaataaaaagctgaatagtcaatagcaaagcaggggataggtggagctaacaggaagagagaataaataagaggagaaatctaggcttaagaagaatgagaagagaaagaaaggaacacgcccagggccagccagcaggcacaaagtagggcatacagaaaaaaaggtaataagctccaaggcaaaatgtagatggagattaaaaaggttaataagtttaaaacaaaaaagctagccagaaatgagcataagctaggtccacatttcataaacaacaataaatctccatgtcatgatttgggaacttgttggtggcccagagggaaaagcctggcacatttggcattccaacatggggcccaaatttccacatagggactgagaaagcagaaaaaaacaaaacctaaaaacacacccaaaatggatatggctcctttaagaggctctgccatacaataagtcctatagcagctggtaagcttagtagaaacagcaagctaagtaaaaatgtctgcaacagcatgggcactggcatttcagagctggagtggttgcatgcatttgaatacagtcaaactcacctctgtacctggcctgagaacctaaggctcagctctcacagaccttaggagggatggagtcagccaccaaaaccacagtggagggcccaacagtagcttggcagtttaaggttttgctcatgtagatagaaaagtctagagatatgcaataaagcaggttcggatggggaaaaaacctctaagcagattactgtgtgtttaaaatgtgtgtaggcttaagaaagaaaagaaaatgtatatagacaatcatagaaaaagtaagtaatttgtaaataataataataataataataataataataatataagaataacccatggagaggtgggaaatacacaaggcatctggatcctgtatgttgtgttgactttgaattttttgaatgctgatgagtgaaaacagatgctgagagacatgagattgtaagaaggactaatgaaataaaccagcctagatactttaggaatgccttaattttaaaatgaaagtcagaaaatgtattgctttggggaagaggttatgcttttgtttccatggaaaatgaaaagctgtagatttgttcaaggttgatagagatcaggtttgattgaggaagaccccccctgaaaatcctagctacagacataaagaaataaacctagataaactacaggatagatgatgtatattttactgctcaaatacaaaacacacaaaaaaatcatatttgactggtttgtgtacaatgcacagttcatgcttgtgttaatgcagatatatattatacttttgaaagtgtgtatgttttcagagccagataaaaatgggtggcccaggttatccattctctcagaatgcctctgttgcagtttcctcagaattctacatccagaacagcttcaaggctactgcctgagatggtccagcctcacagactattccagccaggactgcagataagccttgtgctttctcattgcatagaaaccagataacaaatgatacagctagttttcttaggacttcaccattatctcaatttccttaggttccctaaagatgttattaaagatgctattatccagagacaactggaatcagtctagggaacacaacacccacattcacaagaggtgatgtgtggttttggccattcagtgggttatgaatgtttgtaattgtttgagggggatataggaatataggataaaaagacagctgttaacatcaaatattttacattggtatggattttcatgtattgatacaaatgtaaagttatttttgttatactgtatgcatgattttaatcttgtttaaaagaatttgtatactgacacaaatttaaaattatttttattacaacatactgtatatatctttatatacctttgaaagtcattgtacttatgcaattcacttaaaaatgcaatgtgaagttctagtccttgaaagctattattataaaccgtttaggataattaagaaacacaggctagaagttagtcatctataacaatccaacttgtagttatgttaggtatgttttcaagatcatacagagatttatcttacatagacaaacacttcaaagacctacagagtgtggcatttaaaatgttttgttaacatagagctttttatgacagtgagacttctgctcctggcagtatcaatatacttcataaaacgatgatggacatcaaagaaaatccatatggagattgctttaattgtgacaagctacccatttgtgaaagaaacttctctttccttgactgctgacatgctgtacaaatgggacaaacaggacataaaagaaaagactgttgaactttgtcgagacaaggtaggatagtctgcttcatagaaaaatctgccagacattctgaaggacacacaggaaagaggctgatgaactttgccaagactaggtaggacagtccttcaaaattcctgcttcatggaagagtctgccagatattttaggtctgtaggccaaagatggatgccccaacattgcacaggaaccttcagtgactgtccagacagtcagatgtctgtcgtttcatagatttgaaagtggcttgcaatgaacttcctgtttactcaggtaatattccatccttctggggtttgtgatggggttgaagactagctagttatagttacagttttccttagttatgacagaaggtaaatttggtagaaaactttgaactcaccaagataggataaaatatggagtattttttttgagtttgccaaatataaatgagctgatattgtgaatgtaattattccttgataattgtctttattgtgtatagtcttactacattaaagttaaaacttttcttttcattcagacaaaaaggaggaaatgttgtggaatatttaatgatttaaagatgttttacctttggttatgccgtggaatactactttagctgtataaaagaatgttatatttgtttatgctgcatttgtttaattatgaaaggatgtgttggtgtttcaccttgcttgcctaaggcactagattgttctaataaaaagctgaatgcccaaaagctaggcagaggagggatagatggggactgggtgtcagagaccaaaatagttccattatggaatgtcttaaggtccagcctccagtttcattaaacaggagcacccgggagctcccgcccactattgtattgctaatttaagcaagtctgctattgtatagcatagcctcaatatagaatgcctcctagtttgcatctctacaggactaagcatttgaataggcctgcacctgggctggaggctaggtatgtaagtaacatgtaaggacagagagttaggagccatggagtagagagaggtcagaagagaaatggtctcctcgtggccatggaagcatggttaagaaacagccaagaaaatgttaaataaacaagagatgctagttttacaacatggaatgatgacaagatgcctgtgttggtctttatcgatgttgggttgctaggagctttcaagttcacgctcccccactcaggccaaacctcatggcttccatggtttggagccgagaccggctgggccacgacaactcgggggtagagaaaataaataggaggagaaatctgggttcgaggaaaagggaggaagaagagagaatgaggagagagagagggaattccttgggccagtcatgaagtcaccagccaacagacacagggtagagcatacagaaacgatggtaaaaggccccgaggggaaagctagatgaagagaatcaggttaatgtaagttcaagaaaaaaaaaaaaaaaaaaaaaaaaaaactagtcagaaatgagtactagctgggccaagctatcaaaactaacaataaatctccatgtcatgatttaggagttggttggtggcccaaaagaaaacctggtatatactgccatggcaattccttctgattgtgagcctgaggtgactagcttgtggcaatcaatgagcagttatgtgcagtcctgacccagtgctgctccttagcatttgatgtgggagtccctaaagaccccctttcccgtcttatttctttccttactgggcttgccatgggtacaaggaatttttaacaattgttaattactgaaggtttggaaaatgtgtctcaactgactctttcaaagttgagttagaaaacttggtggcacataaatctgctaacataattaaaccctgggtatctgttaacataggggagaaattatgaaggaaccagcttcccttttggcagccataacggcctaacatgtgcttctatgaccttgttctagacactagaaagtcagatgcctgtcttgtgacaaggaaccaatcagaagttagctggtggcgctatgctttacgaccctgcgtgtgctttacggacaaatgcacagcaatgacgtagagagcatagcaaccaccctgggaaggcctgtgggccataacaaccagtcgaccaatcaacacagggcaagccctctaagcctggaggcacaccaatcgtgagcctgtgcgtacccctagacactccccttacactgccctataagatctttcgggagaccctaggagccgtcttttctggccatctgccatggcgggtgggtgaaagacccgatctaacatggggttagctcgttaaattacaataaagcctcgtgcagtttgcagcaagctctcgaatctgcctggtgattggggtgaccgagaacgtggcctgggaccccggatacttgagttttcgggggtctaacaattagattcctctgtggtaggatgcagtttagaacccgagacagtggagtggtgagggtatctggggtagaaggggattctgcataaggtatggctgtgcagtgatgaaatgtcctcagggagacctgcccagtaatgcacgaagaaaccccgtcttaattctacatagtaattatgaaacaccctggaggtctccctactttagtttacgggcatttcctggaatgccataaagatcaatgtatttattttctttcctttgagccaaggccctttctatcatcatgagagtattacttggaatcttgaacttggctatgggctctctgggtattctcacataatgtcttaagcagttccaaggggcacagggtcgtctacatgggcttctggctatcttggctggtttgatagtacagaatcaatgaagcctcccccaaacaacaacaaacaaacaaacaatcagaaacacagcacacctatgggatcctgtccttctacacccaagtacctctttttcctgttttatgtaacgatctcaggtacctcatgttccatctgggcatcatcacctcccgctttggatgcttctgtatttggaagggcaagctcttcatcggccacactgagcttaggggcagcagaagaaggacccctgccagtgatgcatacttaggctaatagcctgtgggcttctgagaagagaaagcacaggtagtggggagcagccctcaggagttggcaggaacaagcctctttttaaacaaaaccattaagaacatgaatccaacagaatctcagtggctctgaaaatatgatcatgtcctcactcacatctctctagtataaggaagtagaaaatgatgtttgggatcctgaggttctatgtccttgcactgtcactggggcaggaggatgcatcctggaactcctgccccatactctgggactgagacaatgaagcagtcagtatatcctcccacacagaggtatttaacagttttaatgtcagcaactgtgacttctttgggtcttctaatgatcatttgaaagctgaattaataataacaatgtgtttccttaatgaagaaatcaatcaattgctcaatcagtgaggcccatgaagtaggggcagattcatgacactacagactgaaggggaggcagaataatagtaaccagcattttaccatgcttgctttgtgccaagtactattctaatggctcagctctcacaactgttcatacatgagctcttctcatttctattatacagatatggaaactgaggcagagaaaggatgagttttaagactcaagttacatgctaggggaatgatatacctggaattcatacctagacattattactctccagtctgagatattttctttaaaagacttgaaattcttgttttatatttatatgtataggtgtttctactacatgtatgtttgttcatcctctgtgtgcccagtgcccacagaagctagaagagggctgtaacaggcccccagaccttagcacaactgacaccatgatagaagtgccaatcaagccataaaattcagcatgtagactgcaccacctgccaaaatgaaaacaaaggccatatctatctaggtctgtagttctgggaaagtctcttaatgtaataaccttgttctctggcgtctgtagttctacttttggctaactgttcttattaactgaagtgtgtcaacccagaatttgctttttttttgtacttaaaagctcaccctgagaaaggctcaatgataccctgggatccccaacactcagtgtagttgctgagactttctgttgatgcaaacccatgttcaagtagtcttctctggtggaaacctcacaacaaggggatcagatcctatgggactagagctgcaggcagttgtgagccatcatgtggattctgggacatctaacctaggttccctggaagagcagccagtgctcttaactgcgtagccatctcttaagccctcaagtccatgtcctttactatgaaaccaatgatgccttcatagaggagaaataagaaaatattcttctttgggaacattgaaaatgagagctattcgatatatacaacgtactttaagaaagataatggtctggactaacatggataatgaagatgcagtatacaagagaagagccatgcctcagaaaagatgtagagtttcagaaagttcaggggaaggtgacagtggagggatatttctagatactgagcatcccagcctccatcaattgctagaaggctacatcaaacattgtgacaacgaatagcttctccacacctgtaaaagcttattctctgagctacctgaacaaggcttggagctaaggcttcgtgtgcatgacactcactcctaatcaggcacaaatcaggactggggagacatctcagtgaataagattgcttgttgtgcaagcatgaggaactgagttagatcccagcatccaaataaaaagctgggtattgtctctatgcctataatcccactgtgtgtgtgtgtgtgtgtgtgtgtgtgtgtgtgtgtgtgtgtgtattgtagaggaaaagaaagagaatcactgtgacttcctggtcaccagcattgttccaggtttagcaagagactttgtcttaagggaataaggtggaaagtgatagagaaggacacctgacaccttcatatgacctaggagttcatgagcatggttatgcaaacatgtaatacacacacacacacacacacacacacacacacacacacacacacaccacaccacaccatctccagagtttctgatccaataggaggcatatgtctaccaaactgttaagcattgctgatgatgctgcagaaaacttggaagccattgttttaaagcagaagccaaaaagacgcacaaaagggtccaggatgtgactgaggatattagaagaaagggaacagaaatgaataacagaacgagtgtctgacagtgactactgcctattgataacttattctgagcccaagctaacaaaacacccaacatacattatcattttatcctcaaatcaaagtttatgtgtagttaatacttccatattacagcagagagagaaatgcatacattatgacctttccaagccatacaaatgtagacttaaggctattatgaagtacaaaccttagttggtatcactgcttcagagggtaccactgtgtttcaggatatttgaccatactgtgaaccccaagactgaattacttactggaaaatcctgtgtctagttgtggtatggctgaaccctagcacacacctttaatccaagagctttctgcttgaatgttgtaagcagggttaaataaagtcaatcacaggtcaagagttggagcaagcaaccagttgacaggaagtcagcataggattattaaggaaaaaaaaaacataaagactaagagagagtcaggaggacagatagagagatgcacaggaagtagaagggagggacatttagtttgaggtttttcatttgagacagtgtagaagaaaggagtttttttcagcgacatcagctgaggaggaaggtcaactgattgttttctctgcctctttgagctagcatgcccttgccacagaatctggttcttgagtcattattagtaaatcgaacgattgagatttagataaaaacaacacctctgctgcagagttcagggagccatttgatgtggtgtttggaagtatacaatctctaaatatttcagacagtgacataacaaaacaagagttaatttggtgtgatagtttaatgtgattggcacccataatttcatagggtgtggcactattaggagttacgactttgttggagttggtatggccttgttagaggaagtgtgtcactatgggagtgggcttagaagtttcctatgctcaggatactaccaagtgtctcagacaacttcctgttgcctgcaagatataggattctcagttattctagaaccatgttggcctgcatgcagccatgatccccaccatgattataatggactgaacttctgaaactgtaagtgagccaccccaattaaatgttttcatttataagagttgcggtcatggtgtctcttcacagcaataaaaacccaaactaagacaattaggaaacattattttcattcctaaaggtttcatagcctccccaaacagtgccaccaactggggtacaagtgttcaaatatgtaagcctgtgtgggatattttcaatcaaaccgtaacaagtgcccaccactgggaggggggaaaagaagacaaaatcacatgcaaagatagatgcataaatcctttgaagcaaagatttctgttgtatatgatgtttgtatacagattttgccatcagaggttttcgtcttgaatctgctggatataattcactcatttattgaaaaatattactgagatttactaaaacagtgatttattttatttttaatcatatagatgtatacatgcatgcctacttatacaggtgcccttagagacaagaaggtatcaaatcctctggagttggaggtatattcagttgtgagctgcccagtgtgggtagtgggaaacaaacatgggtcctctgcaagcccagtgtgtattcataaccactaagctccccttctacatattttctttttaaagacaagtcttatattgtacaggctgacctcaggcttcctgtttggatgagggcagccttgaatagctcacccttctgcctctattcctgggattccaggaacacaccaccacgtctggctttcctatattgttcagagatgagaaacaagaggcaagtttcttcagtagttgctttttaccctttcccgaagtccttcacattctagagctttctatggtgtggaccatcttgccacatttggatcagagctggtgtcatctggaaaatcctcaattatctcttcacttttttcactcattcttgttgtaatttccttctgggattgcagtctgtgtgggactgagctccagtcctgacctctgagcttactcatgtcttctgtgtttagatgttcaggcttgagaaactctgggaataaaggcttttaaactagcgcctgttcactgtgtattccgccattctttctctccagtcttctgaattttttcaattgtaagtgtatgggataccacgtgaggacttagtgttatgccagatcctctgggaatggagccacagatagttgtgagtgctggaaattgaacccagtcatctgcaagaacaaccaatgctctgaactcctgagccacctatccagttctcactcacattacttctatttgattcattttgtttaatttcatttatattttgtcactttgattttcaagtttttttttcaaatctgtcttgctagtctcttacagcttgcttttattttcagaccttatttgttcaagcaaatcaaataacttttatgttatatctagtatgtgttaattctagtattggggggttttatctggctaggcctgcagggttatatctgacagttcttagtcatgtagtcattttgtcattttttaaaaatctttacctaatgtcctttgttccattatccatgtaattcttttatgtcatgctgaaatagatttatctacctctggcaatattctagcttccctcttataatctgggaataagaatcaaaacacagtgcaattttattaaaatctcaaagttgaggtttttttttcactctagaaaaggttggacttaggccaaaagcacacacaggactagttatagttctaaaatcttcagatgagttttctttctcctgttcccactgccaagatgaaaagaaatgtctctggtatttgtgaaatggcccagagaataagagaactatggctcttgcaatggacctgggtttggttctcagcacccatgtgacagctacaactgcttgtaatccctgttcctcttctgttcttcaaggagaccaggcatgcacttatatacatgcaggcaaaacactcatccacataaaaaaaaaaaaaaaagaaagatgcctaccttctgctaccttctgtcctgtccttctaagaggaaacttactgaatgggatcacgggcttaaatgaagaacacggttaccctttctactttggatgtgtctttagctttgtctactgtcatgcagttggtagccctcaaaacatgcattcaatttcaccataatttagcagattctggtcggaactagaccttgcatttccataattcctgtcttatcacatcactttggttaagcttcagtatgctgcatgcttttgggccagctcagtgatgcacttaaaatattctaaatatacaaatgtacacacagaggcaatgttttaactgctttcatcagaggtgctgttcggggcacataattgcctgatcaatagaataaagtgcaagtccagagttaagttgaaatgtattataaattaggctaaaacacaagaagaaaaactgtgagtttttcattgaatgctattgttaaatgaaatagcaagcaaaattcccaagggactgaaatgaccagctcccctttgggcagccataacggctgaacatgtgcttgtctgaccttgtcctagacactagaaagtcagatgcctgcctcatgataaggaaccaatcagaagttagctggtggtgctatgctttacgaccctgtgtgtactttacagagaagcgcacagcaaagatgaacagaccatagcaaccaccctgggagggcctatgggccataacaaccagttggccaatcaacacagggcaagccctccaagcctggaggcataccaatcgtgagcctctgcgtacccctagacactccccttacactgccccacaagatttctctccgaagcagttcgagctgtcttttgtgagccatctgccatggcgggtgggtgaaagacccgagataacatggggttagcttgttaaattacaataaagcctcatgcagtttgcatcaagctctcgaatccgcctggtgattggggtaatcgcagtcgtggcctgggaccctggatacctgagttttccgggggtctaacagaacaatatgggttttaattttaaacttaattgtattttatatgtatgagtggtctgtccacctttatggatgtgtaccacatgcatgcccggtgcccaagaaggccagagaggacattggatcccttgaaactggacttgtagaagattgtgagctgccatgtgagtgccgggaactgagcccccatcccctgaaagaatagcaagtgctctagccactgcactatctctacagccccagaaatagtactacgatttttatttccacatttaaagctcgatattgtgcccaagacacagagttctgtgaagaatgaatatcataatgcaaacttctatatggtattgaaagttccaaaggatttaatcaatataagtctattaaatgtatttggaagtgtgcttgagtggcttctgcttgcttagatatttataagatgcacacatgtgcatttattaagccttcctaacattataaaatagtcacagtttgtgcaaagtgagtttctgactcgctaccgggaaggctattaacagacaggtgcaaactcagtgacttccattagcactaacccatttcagactccagctttcaatttattcttatgttaggacgtgtttcattctctggcttcgatgaattttgtgctatgaatttctcttgggttgggcttttgtgagctgagaagagggcaaagtgctgagcataaaattacagaagatagtcttctggagttggtttctcctctccgtggtgtggtgggccacctgacagaagcagcttgaagatgggtttactttggctcacagtttaaagagctgtacccatcgcagttggggaggcatgttatccctagctctgtcattctgggaatcaaggaagcagagagagctggggttctgtgtaatcctcagggtcaactactatagcaacacttcctccaggttgccctcccacccacacccacacacatacaatgctacccaaaaacggcactgccagccaggaaccaaatgttaaaacatgtgggctagcagaggacacttcacattcaaaccttcccagtagtgttccccagaaaatggaggggatctttagactgtgaaagtagactgtgatactgaaactcatgagtctcggggaattctgtgaggccaagtctatggctcagcctgtctgtctggggactccattccacttgttgctaagtggactgaaaactacactgctgagaggtcagagaccacttcaggtcttttaaagaagcttaaagcagatgtgagaatctagcaaactggttctcaaccttgcttttgtcattttactatcttcatttgcaagcaataagtctttgagctctgttccctcacacatttttgtttgtttcttgtttttttgtcttttttgttgtttgttttttgagacagggttctgactaccctgcaactagctctgtataccaggctggccttgaactcagagaaatccccctgcctctgcctccagagtgctggtattaaaggtgtgcaccaccatcactgggcatcacacaacattttaagatctcgttgagacatgaaaaaaagaaaaacttcagaaaccattagcccagccacacagtgtagacacataaggtattgagctataatgatcactattttttgaggggggagctggtgagcagggcttggcacacaataggccaataaatcaataaaatctattgtcttcatagtgtaaacccttgtctacattccttccctgattttagccttccccaactggaggactatggccactccttgttaaaaagaagccacatgtggaggtctattcaaggacaaaagcacttactgtgcagatactcagttaaagaggcaggctggctactatgccctgtggagggatagggagaattctcagcgcctgactccagctccccccaagtctgcagtcctctgttgttcctgtcctgtcctggcagagcttgcacataccattgaatcaaatgctgacatggagctttgtggtcacggccagccacccacatcttcttcatgaaggagcgctgtgtcctactgccagcctcctgaaagaggctagatagagagaagcccgaagtttttagggctgctttgcagactcagagaggcttttctctgtttctttgtttgagaactcccaccttgcctgcaacaatcaagcttgttgatcagaaagacatatggagttctaagaggagatctcaatagaacacaggtttcagaaggatgtgtgtggaggatacacactgtcagacagcagaagagagacactgatcagaacacaaagccggggattatagaatttcttccaaaccctaccccccccccaaaaaaaaaaacacttgccagtcttttacttgatttgtgacattaaagtaattacttagacattctgggcttcaagacacttttctgcagtttgaaagcaaacaattttacagagatatttctatttccctaccacatgcccacttatagacattattaatcactgacatccaggacagagtgtgagagcaagtgactttcatcaggggtggcttcagtactcacaggcagagtgtaatacagtccccatgtctctgcatatcctaaactctaatcctgaccacagattagcatagatagtgcagaaagcccaacacccagattgtgcaaggtgccctcagagatcagaagcggacatctgatttcctgcagctggagaggtaggtgattgtgagttaccagtggtagctgcgaacagaactagagtcctctacaagagccgaatcttagcctctgagccaccttgcaagccccacaagttcttattggtatcatttaaaagtgagcattggcaagtgaaaagcaagcgaactggctagtgattatgctctgcttctacttggtgaatactgtgtactaaatataacaaacagcacaggaaatatgtggtatggtttcagtttcctcaacacacagtgtctgtcagttcatgtaactgtagggcagtgtccttatctgttctcatttttagtcttttgtcacttgtttaattcttttaaaagaaatacctgctaagccaactcaggacccaatagcagcagcatcagcagcatcaacaccatttcctcctcccctctcccctctttctcctcctttttggggagggtgggtcatcaaattattttattataaaacgtgtgtgctatttattagtagtttttctaaaaacacaaacgtgagaactgagcacctatccagagtactagcccctgcagctagggggaccagcacagggtcgccgggctttccttataccccagggtacctcacttgttcctcagtcactccagagctccaagctacctctgacaagggaaaggaaccccctgaaactcccaaccacaggaaggtcacaaccaccttgggctactgatgttaattgctgcacatctaggacaataccaaaacccaccctccaacatctgttcccattgccctttgctgtcctgatgcgctaacctccagcctggcttctgcataccgcagagcacaagcacgaacttgcacatgctgggtccatgctcaggtatgaaggtttgttcaggacagcccaagtcatgcggtccttaaacctctgtagcatctattggagtcacacccttgaacaggctggtcaaaggcagcacaaggcaggagcaagtagacaattgtcccaccaccaaacctgctctccatccaatatggacacccaccccagtcaaagccaaaatcttgacatcagtaagcaactaatattcatatgaaccaggaacccatttctttattaaacggagctcttcaagggtatccggcatgtttttagggagcatcttgagatggcgctggaggatcctggctttcgggttctggaggcggagctggcatagcttcttttttctgggttgctctatctgtggcctgaagatgcgatttagtttgggatccactacctgtccacttctgcttctaacatgcctgactgaaccagactctgcctcagcccatttcgcagctggttcttggttcatgttcattttaggattccattcctgtatgtccagatgtgttgacacaaaattatccactttctgatttggattgtgacttggtgcccacgtcggccaggtagtcccgggggaagtagtcgaacaagcctagcttcttgagctgcttcactatgagggggatgaaccgcaggtctcctcccagaggcagcgatttcgggttgaaaggagagtcctcctccgattcggggttcttgtttaggccctcggtggctgtcctcttacctttggctgggccctttgtggttgccccctcacctttggcccggccctccgcggctgctcccacatctttggccatatccccggcggctgctcccacatcttcggccaggccccctgtggctgctcctgcctctccagcccatggccgggccctgcactcgctcagctgctcctccgcaggtcaagttgcagacacggagggcgccccccggaggtggcagccacagcgatggtgggaggctgcagagcccagggcgcttcctgctctggagcttcttttttaaatagggcttattacgtagcccaggctggccttgaactcacaatccttatggctcagcctcctgagtgttttgattacatacatgcaccaccacacccagctgagtttgtgacctataaggaattctgatagatgtagtggttttcagtttcataggaaaggaagcaaagtaagatacatttagaattttgtgtcctgcattattgacatcttccggtagaaggggatctccgcttcgaacagagtgataaatttcagctctggaatttccttcttaatgaccagaaactttccctaaagatcactgcttcttcacacattttcatactgatttctcctgctctcctcaaatatttaatatcaggcactataggatctattacgtacacaacacatctcatagctgaataaggcatttcagaaatcctggtcaagaacagttagtcctcacaaccggaagaattgtgcccagaagtgaccaaatcgctccagtcctgagctaaatggaacatgaatgcagccaactcccttgcctggttactagacatgcttatggctgctctcatacttcttactcacacaaacatgtatacacacatgcatgcttgtgctagtcaaaggcttgacagagactaaaaaattcagaaggtcaaaacgggagagatgttcccaatgaaaaatgggaaatgtgctgcaaactagtgacacataaaactaggtacaagctcagatctacaggaaggaataacaacagaaaaatagcaaaggaaaacaagtagtcgcgctcgcgcgcgcgcgcgcgcgcgtgtgtgtgtgtgtgtgtgtgtgtatgcatatacatacacatatataatttaaaatgtatatgacttaaacaaaagttgcttaagacagaaaatgtaacactgtagtgtaaagtttatagaagctttacataactaagataccgaaaaacaaagaatggaaacttgtagatataaactgaacttttaaacacaagactctatgaattagtacaatgttaaccctttacatattgtttaagatgaatatttaaatacctagataagacacaagagattcaactgataaagctacaaaatgaagaaatgagttaaaatgaaataccagaatttattcaaagcaggaagagagcaacaatctgagtcagataacacaaacaaaatcaaacccatataaactaagttagtgaaaacaatgtaaatgattaaaacataagatatccatattcagttttaatttttttattactgagattttcatacatgcacataatgtgttttgatcagatctattctttacttcctcccagccctcccacacctccttacacttccctttccctcccaatgccatgtgttcttctttaaacccacaagggcacttagtgctgactgtatgtacatgggtgtagtcatgtgggagcttgggcagcttatcaagggctgattctctgatcaaaactgattcatcctcttctagcagccatctattgataatatgtcctcagctagggaagggactgcataagcccccccttcccatctaatctatgctggcatttcctgtggcttagtcttgtgcaggtcttttacatagattccgtgagctcatgtgtgcaacagtcctgtaatgtctggaagacactgtttcacaatggttgcttactatctctggttcttacaatcaatatgccctctctagcatgatgatctctgagccctgtgggaggaagtctaataaggatatcccatttagagctgggccctaattctactgtctcttattatatgcacttaccacttgtgagtctctgtattaattttcaactaaaggaagtttctctgcaggggtctgagagcctgtgtgtcccaaggtaagtacttacaaagaatttaatactatgcccattaacagaataatagaagtacattctttcctacgaaacccagacacaggttcttggcccagttaacaggtatgagttcattttgtggagcaggctttgaataaaatgtgagtgtgattggttactactataacatttggccactattgcaccattgggcgtatcttgctaaggtgcatgcagaccacagctgggtaagattgatgattacttttctcctcttatagtatgcacagccccttccagtgctgtgaaaccttagccagtaagggtaaagcttccaagtcagtgtcaccttgatatcatttctctaatcctataattcaactatgtggggtgttctgtaatagggttttaccatcaaatagggttttacaatgagaatggcaaaacctgtaaattttgtaagatgagaaataaaagactcagagactggtattagggttcaaacttcaagctgaagatcagaaaagcaaacagctgggcactatctctcactctacttcacaatgaaattcgatcctgactccatcaaacctcagactgaagcctctcttcagtgtggctggagactcctgagacttcaatgtcttcctatcctcagtgtggctggagaatgaatacctgatacggactcctgaagactctgctcctgtcttttatactcctctaatgctgggattaaaggcattatcccaggtgctgaggtcatctttgtgagagagtttctctttaggactgaatcagtcttgtgtagatcagggtggccttggactcacagaaatctatctaccattttttcttagtcctgagtcctaggattaaaggtgtgtaccaccattgcctgatttctatagcttgagaggctggctttgctttctgaatctcaggaaaccttcaatttatcatacataatataacaccataaaattttttattggtctaagtgatcccactgactaacagcttgaaaggaggcaaaacatctgtcacatttgttagacagcctatgttgtgttggggagacgtttacttcttgctatagagtaatacacacacacacacacacacacacacacggggtggggggtcggaattatccatgtcatatagtagtcaaaacactaaatgtgtagaacaattaaaagatgcaagagtaaaagatcaagtcatgtggcttaccatagtaatggctgatttgaaagagcattacacaagccctgactactatactaagtaagactatcatagtaaaatggggggaagggagaaacactttccatgataaaagcaaacaaaaggaatgtgtgaccactgagacagacaatactggaagaaactactttggattgaagaaaagcatagtcaatttttaatttttttcttttttgttttatttgagttataaacacgattgaattacatgacaatcccagttcccttctccatcccctcttcccctaccaccctgcccccactaaaaccctacttatcggatatcctttcttctaatctacgcctgactcaacctttctgctccctcatgacctctgcatcttttttcttcttcccttctcattcttgtagctccctccccccacttcccatgttctcaatttgcttagatgatcttgaccctttccccttctccaggggacaaagtttgtctcttttagggtcctccttgcttactagtttctctggcagtgtggattgtaggctggtaatcccttactttatgtttaaaatccacatatgagtgaatacatattgttattcttttgtttaaaaagaagaaaagagaaatgctgagacagacatattgactataagtttattataaggctaggcagaatggggagactaagaagaggaacagggtaatggctgaccgcctggttgccatagagagagtacataggtgagagagagagagtagaaaggaagctgagaggaaacagagtggggaaacagaaagagggaacagagagtgtaaatgggcagggacttgttttttaaaggggtcctctgcacctgcgtgcagacttagttcccatggaaccttgggctgaccagggtattgcctgttccaccaggtaacaggggcaggccagcataatgcctgaacctttcacacacaagttatttatacgcctatgcatgtaggggacatttattgaaaggaaatgtgatgcaaagaatgtttgtgggaacaaagccttctgggagtatcaatgaagcaaaccttttcgtgctgggattctgttacatctttagcaaaatgtacaggtcttcccaatatgcagtgataattaccatcggcatacactgattttcaattctctctgggatttattggcaagatgttggcagagcagaagacaaggttgagtttaggaaaaactgtttttcttaggtcctgtcattgaggacctaagattgtatgatggggaaggggttcccgaggagtctcaagatgactgaagggaatttgagactggaaaggttgattatctggagtgaatctgacctgtttgtttggatccaattcagctccctggaacttacaagaatccttagagtttgtagaaacataagtattagacacattagtagcatattcacgttagaagcaacttggctaaaagcattaccattttaaaaatagacagatttttttaggacaatgaagagcatcttaatcttgattttgtagttatgatcctatagtggtattggtgaactttattatgaacagtagcatgagaaatagagaagtcaggaacatannnnnnnnnnnnnnnnnnnnnnnnnnnnnnnnnnnnnnnnnnnnnnnnnnnnnnnnnnnnnnnnnnnnnnnnnnnnnnnnnnnnnnnnnnnnnnnnnnnnnnnnnnnnnnnnnnnnnnnnnnnnnnnnnnnnnnnnnnnnnnnnnnnnnnnnnnntggattggcctagggtctggggttaccagcagcacccctaccccaggtctctctgcctgaaggataagattttacctgaatcaatgattaaagaataacagagacttgccagcaggctgcatggacagccacccacaaggtcctccattcatagtattgggctgcaggacacctgccttcttgctgatagcatgtgacctgtggattacagactttgggaagactcgtctaccgttggcccaagcaacgaggggaaagtcgattccattgtcctcttgtccaaggtctggaatactttgtagtagttgagggcagggttgctcagtgaccagcattgtcactgactcgagatgaagctttttcagtgcccatcagtcttcttggaggaaatggggtggggccagcagctggcctatctctctgttatgaaaagctttttaacaaaacattttaaatgccatattctctagatctctgagcatttgaggtctgtctgtttagtatctcagcagttaaaagtttgcctttagttagagaaaaatccctttttgtaatnnnnnnnnnnnnnnnnnnnnnnnnnnnnnnnnnnnnnnnnnnnnnnnnnnnnnnnnnnnnnnnnnnnnnnnnnnnnnnnnnnnnnnnnnnnnnnnnnnnnnnntcgttaaattacaataaagcctcgtgcagtttgcagcaagctctcgaatctgcctggtgattggggtgaccgcgaacctggcctgagaccccggatacttgagttttcgggggtctaacaatatagagctagataagtatacagttaaattacaggtacagagacaagcaggactggataatagtaaaggggaaccagaatgtaatctctgatccatacattgtagcaaatggacaggagatttaaagagacagggtagacttaaaagagggccctggaaaggtacagtatttagtaaacaagccatgaatgacagagccagtgaaagaagaaatcacagacagaaaataaaataaaaagcaaaaagatctggcagaaatcaaaaatctggtagacaggtttgctggcacaggccgctggagtgggtgtgcctacaggtaggtcacatgaccaaaacggcgggtaccatgtctgtttacctgcttgttggatgaaaccagaaaggttcctctatgcatttcccatgggtgaggcaagtggaaaactggcaaaaagctcctctatggatgcatgtctgcccgtgggagttgccaggggtctggccccgaaggggacacagctgtcccgaaaccgaaaaaggacccagcagtctgaaccaagaaagcaccactcctggagcgggatcccatgcctgaccttcaggaaatgcacccaacaagtaaaagaagaaataaaaagcaagatgtctggtggcagtgcttgcctatgcaagtcagtgaactgagtgggcaggcctaagttaggtcatgtggttatgaccaagatggcggcccccaggttagcccacgtggccgatggcagcaaccataagcacattctcaattgccagaaaagtttcaaacctcattcatgtggaaaaatgaaaaccagcaaacaaacaaaaaactcttagagccagggaacagagagaggggacagaggaagggaaccgagagagaacaaacagaacaatgagggacattcccaggtgaaagaaagttcccactgggaggcagaactccgctcatttacatactcgctgacagtaaccgaaagatcccgtaaaaatgtatttcccatgggcaaggccaaaaaatggcacagattgccctgtctaagagcacctggcccgaaaccaaaaatggacccagagtgaacagtgttgggtctgccccaggggaaaggttttgggtatcttactggattgaagcgaataggcagatcagtgagtttaagagatccttagttggaaaagcggcgagttgagttcggcatctcaggctgctacaggcaggaggaagtgccaggaaaagcggagatggaagtgggttatgagtctagattttagggtccctgagatttcccgtgctcctggcaggaagagttacaaagaaagactgtcccaccagctagctttggtagaggttctacggagagagcctaaaccaagttgggcaccaaaatgttattcttttgtttaaaaagaagaagagagaaatgctgagacatgatacataagactataagtttattataaggcccggcagaatggggagactaagaaaaggaacaggggtaaatggctgaccgccacttcacagttcacgaaggctcnnnnnnnnnnnnnnnnnnnagagagaatagaaaggaagctgagaggaaacagagcggggaaacagagagagggaacagagagaaggaacagagagcgtaaatgggaagggacttgatttttaaaggggtcctctgcacctgcgtgcagacttagttctcatggaaccttgggctgaccagggtattgccagttccatcaggtaacaggggcaggccagcataatgcctgaacctttcacatatcatgtttgtctttttgtgattgggttatctcgctcagaatggtttcttagagttccatccattttcatgcaaatttcaagattccattgtttttttttgctgagtagtactccattgtgtaaatggagtacttttctctacccattctttggtagaggggcatgtaggctgcttccagtttctggctattacaaatagtgctgctatgaacatcattcaacagatgtctttgttgtatgaatgtgcacaaaaggcttgggtctatctgtggtcttctacatgtctgcatccagttatgccagcaccattgttaaagatgttctctttgttccagtgtatgtatttggattgtttgtcaaaaatcaggtgtttgtagatgtgtgggttaatattagggttttcaactgtattccattggtctacctgtctatttttgtgccaataccaagctgttttcagggctatagctctaatagagcttgaagtcagggatggtgatccctccagaagttcctctattgttcagggttgttttaattttttaactctttttggcacttgggggtatgactcagagcctggcacattctaggaaaggcctctactactgagtaacatactaatctccagcttttacttctttttcatttttagaattaacttgtatgtatgttagtgtacacatgtgaaagacccccgaagaggtactttcgtagagggagacccacacacccaggaatcagcgaggccacgaactggatgcaaaatcaagaggctttattggagacgcaggtacccggggcgacttagcctttgtgtggctaagcgccccgagccaagggaaaggggtccttatatagggaaaaaggcgcaagctaggagcagggattctattggataattctaatgaggcattatacagagctattcccattggtcaatgtatatgaggcgctatacagggttattcaaatgaggcaaagtacagagttattcaaatgaggtgaaacacagagtctttcaaatgaggcgaaatacagaatcatttccattggatggttcaaataaaacagtatttgtttttttttctagttttcttatatatttgaattacaaacaagattgaattacatgacaatcctagttcccttctccctcccttcctcctctaccaccaacccccaactaaaatcctacctatcatatgtcctttcttcttatctacacctgactcaaaatttctgcttcctcatgacctctgcatcctttctttccttctcactctcgtagcttcctcttcccctcttcccatgttctcaatttgctcaggggatgatgaccctttccctttctccaggggacaaaatttgtctcttttagggtcttccttgtttactagtttctctgccagtataaaacagtatttgttacttaatgaacagggcagaaggaagttcaggagtctagagaatataacacgttatctcctagtgctttgagtggcagggcccttgcatgtgtgatcctccagcatgttgccagcatctccactcagtggcatgttcattttgaaacactagaggggaggcagttagcaaatacctgggaatttcagttctgagttgtgtgaggctaagacactttttcatcctgcctcagaaaatgccaagcccagaggatgctgttaagggtgctttgatgtcagtactatttaacgtttttagatgttacttaccaggattggtgtgggggggtagttaatatagaaagggaaaatcagagttagcctcaatcatccaacacatatttattgcatttccgttttacatagggcacagagtagataggatctagctttcacctgacccagacccttttctccaggtgcttacaatgcagggattggaagaaggaacacagatcacggcaatccatgctgtgagtattgtgatagagttcggttgaggacacaggggtgcacacagcaggtctgtgttcagccagcagaagatttgaaagctaggatagcttgctgggataggaggaatgaatttgtctgagccaggtgaatgtatgtaaggatcaaaggacatgacaatgaaggaggtggaagtagtgatgggattgggggtgatggaaataatctaagcagagagggacttaatggcagggacatagccaatgctacactgcctgaaatggccttaacatgttgcctaatacttgttactcttgttgtgatacgagtttgtaggcagagacgggcagttattgaatgtacggataattgtgcaacataatccaataattactgtatgagcaagagatgagagttattgacccagaaattccctgtaaaagggctttctcagtccttctagttcccagagagcgcttgtgctgatgttggggggcggggagggaatctacacttttgccccttctgtctaagtaggtcagtatttgctgacactctggaagcctgtgttatttctcagtctgctagaacacttcactaatgaggagtaggtcatgggtttaatcccctcttgggcctcttagtttctctctgttctgtagccgcagacagcacccttaaccctgtgctatgctttctcaaatgccagtggctagcccagaaggctgatgagaccttgtggacagattagagaaaactcatctccactcagccccatactcacaggagtatggctttcagtgagaattcctgtgacctggcttcatcaatgtgactgtggtttgccaagaatgctaaaagcatttactgaactcttattgtatctctctcctcagctcctgctnnnnnnnnnnnnnnnnnnnnnnnnnnnnngaacatttgcacaaaggctataatcagaaaatttgctcttcttcagtggaaactaagaagatttatcaagtgtctgttgaattgggagagtctcactaaattctccagtaagaagtcccaaggcactaactcatgcacatcaaagcacaatttcaaaaatctgtatataatgtgatcattttgcaatactatccatagccccaggcctgagctgggcatctgtgtgctcatcacacagctaaacagggaaaagttcattcaatgttcaataaagcatgtcaaaactcaagctgatcaagtccatttcactatcaatccaacccacaactgtatgagctgttgtggattcttgtgggtgcccaccataactaaagcataaggtcatactacagaagacaccacataccttgattgtaagtgaaagataaaacaggatggactttaattgggaacttccttcatgctggtaagcatccaatacactagtgggtactaagtgggctgttgggggtgaaagggcatcatagatcttgccaatggttcactgtgaaccatgtgaatcagaagtccattcctctcacagtggattaactgctgtggagagaaccaaggatcctctgtttggatttgaggactgctctgtggaggtgaggggaatggggaatccatactgatactataagtccagctagccacccagctccgggataaatcagagacacgttttgtttacaatgaatggtggtaaattagagactcaagtctccccaaagtacagagaataagagttagttatgggctcagccctaaacaaatcgcttataccaccctctctaaggctcagggaacactgcagaagagagggtaggaattgtataagagcaagaagatggagtcaagcgtgtgagtagacaggggtggtaggaaggtgggagtgggattggtcagtgttcattgtgcacatgggtgaattgcctaataacaaatttaattaaaaacttaaaaattatttttagcaaatcaagctcatttgcattttcatataaagtttagaatcatatcatatatgtctgcaaaaatcgttatggggttttgacaggaattgcattgtatctacatatgcacataaggaaaactgtcatattgactgtagtgaatcttctaatctataaagaatagagattcacatgttcagaccctgtgataggctattatcagtgtcttgtagcttcatagcacatgttttgttaagatttacatttacttcttttactctagagtgaatgtaatgctgttatatttattttttgttggtttctgtgagctttttcttagtatataaatgtaccatgtctgtgttttggtctttatcctatatcctaagtttataggttaccagaatttttatacatttctggagcccttctgcatcatttatcatgacacatctccgtatgtcctgggattccttctttcctgaccctgttttgtgctctgatcacattcttcagtcattacttcccacaacatcagcccatgataaactcaatcaagtttcctggtcaagaatgtttcctttactgttctttccccaaggatgtttttattaggaatagaaaacttcttttaaattcgaaaaacattgggccactttgttcttgaccttatggcttctgtggagagatgaactacgaatcttaactgtgttcctttggatgtttccaagactttagctttgtatggtttctcaaagtgtaagtgtgcctcatagtgggttccatttgggctttcttgtttggatcatctcagctttgttaatttgctagaaagggcacctggtctttgaagattgtgcagctgacaagtagaaaaacacaaattagaacttgcctgtttccagagtgtctcctcatggctcctacacccttcaacataggtttctattagttagattgtcttgccttgaacaaggatttcttctgggaatccatgaagaggccccgggtaaaaaccatgtaaaattttttcttttataataaatatgactcacgtggatttacaacttggacatgtgtagaacaagggaaacagggtggtcgtttgaacattggctcttttgaaactgtcttctaacagccagatggtaagggccaaaatgacatccttctgggagagtacttgtttacataaagatttctttctagatgtatttccctctatagaaccttctccgttgtagagggcacgaggtccacatgctctcaaataagtattagagaaaccagaaatgttaaacatgcaggcttttctcttcaacagaaggaatttatgcttgtttcatccagaaggccagaggaatggatgctatttagtagcctggtgatcttttactctctgtagggccaggtctgttggatccaaaacacccttctgaccctgcccctctgacaacagatggggcatgcacagtcgtggccaagtcatcactgtgtaaggactctgcacagggtaaggactcagtgggcatgctcggactttcccttttaagctagcaagcaccctcaccccccctttccctttctaccaataaactccacctgggtttgttgatcctcggattgtgtttcactactggtcgctgcagctaaataacaacaaggtctcccaaataacccactctaatgaaagatgtctcatgtaccttacaaaagaatttgctattatggttattacaaacccttcctccttagaccctcatcctgagcactgtcctaagccacaagaacacattcttgtggaagaagtcacagatactgtgcaaaagacatgtagtttgtaagggtgtttccatgtatccatgccataagctttgttgtgataattgtcataaggaaccttttttccaaagttgtattgtgcttaaatatgtaaagaataagcttctcggggtcaaaccacagaagtttgaagcagcttggctcactcagtaatactgcactgagttttcttcttagttcctgaggatggaggatcctttctgtgcaggcagtagagcttgcagagatcctcacactctgtgactggagagcttcattacagttctttattctgcacactcagggcacattcttaacttctgtgagataagcttccttttaattgtttattgccccctcccccctttctccatgtgtaggccaggggttccctgctgttgttctttaggcacagtttggaaggttcaggcattatgctggcctgcccctgttacctggcagaatccactcaggcagtaccctggtcagcccagggttccatgggaactaagtctgcaggcaagcgtagaggacccctttaaaagacagacccctgcccatttatgctctctctgcccctcttctcttctctctgcctctttctctcaatgggccatggcggtcagccattaaccctgttcctcttctctcttagtctttctactctgccaggcctataataaactggttaatatgtctcttagtatcatgtctcatcttttgccgtttctttatttctaatttaagcaaaagaataacacagttcaccttgactttttttgagacagggcctctcactgaacaataacttaccacttcagcttggctaactagcgatcaaacccccagggcctatctacctgtctctctgttcccagcactgggattacaaatatgtactactgaagggaccagcttcccttttggcagccataacgactgaacacgtgcttccatgaccttgtcctagacactagaaagtcagatgcctgcctcgtgacaaggaaccaatcagaagttagctggtggcgctatgctttacgaccctgggtgtgctttacggacaagcgcacagcaatgatgtagagagcatagcaaccaccctgggagggcctatgggccataannnnnnnnnnnnnnnnnnnnnnnnnnnnnnnnnnnnnnnnnnnnnnnnnnnnnnnnnnnnnnnnnnnnnnnnnnnnnnnnnnnnnnnnnnnnnnnnnnnnnnnnnnnnnnnnnnnnnnnnnnnnnnnnnnnnnnnnnnnnnnnnnnnnnnnnnnnnnnnnnnnnnnnnnnnnnnnnnnnnnnnnnnnnnnnnnnnnnnnnnnnnnnnnnnnnnnnnnnnnnnnnnnnnnnnnnnnnnnnnnnnnncagcaagctctcgaatccacctggtgattggggtgactgtgaacgtggcctgggaccccggatacttgagttttcgggggtctaacatttggcgtctcgtctgcgatttgtgaccacccctcacctgagtggattcgatcttagaggtaagatgattcgagctcacaacttatatgttcaatgttatatgtttgcttgttatgtctcttgctgttttgttggtttggtgccatgacttgaatttgatttgtaatttaaatttgtaattcagacttcagggggaaatagatctgagcctgcgcagaatttgtaacgtgtttcgagatcctgaagtcccaccctggacaaaagtccgaggcttatttgaattgaaccatagggtaagcagacatgctggcccagaaatagacatatttctggaacccttggttccgccctagacgaaagtccaagggttgtttgtagttttagtttggggcaccttttctttgcctcggtttgtcctgtctaatgtctgtcctgtctaatgtctgttaagcctggaggattggaatgggctgggtgactgaacagttaagcaacaggtttgttatctgttatctgatctgttgcagcccacaccctaaccgcctgcttgtgtgtcaattttactatttctgttaattttgtaaatgtaaaggctctatattagggtttacaagaattgtttagggcggaggtttgggcggcagccttccgaaatctataggggagacttgctttcgaagcaagttgatctccatggggctagccatctgaaattctgaataggaccctagtctatgttaaacatctctttctgtccctactgcccacgtacatggcatgcatgagtcaggggtcttttcttgatgctctgagcacgtggtgccacctcaactgtgatcggcgcccggaggacagactgctgcactgaggacacccaggaggtacgaacggaggccaagggcttggatcctcctcagttagcggtgatttagctgccgggttctgctggcaccattgccttataagcagcgcgggtggattgggttggcatctgttctttcctgtctattctgtgttatcatcattgtttttcaattcaggatccaccacgccactccctttctatcccccccacctgcgggtctgtgaggcattccaagtggggctgtttctgtcccagctacggtcctgcctgccatgggagttccctgctctgagggaacatggctgcaaggctgccatctgcctggctgcccggccttctctgtgctccacatacatggtatgcagaggggcctcgggggtctttttcccacccctgcattggccgagggtctggggttaccagcagtacccccaccccaggtcactctgccttgagcatatggagctcgagcgtatgaacttatctgacctgatccggacttctaaaaaaaggcattannnnnnnnnnnnnnnnnnggccttaaagttattaagaactgtaaaagggactttgataaaatttttatgttgactgaaaaatgaggggaaatgtatgagacttaaataataaagagagaaaggaaaaaaattgtctaagaatgtctaagaaagtcagagaaatgaactaaaaggttatagagagttaaagcaagtcgtagaaggtcagagaaaaggttgttacaagtcagagaaaaatgtaaactataaactgtgctatggtttcccatgtctacaaataataaatttttaaaaatagtaacataagttaaaattttaaccatattaagctaattctgtttttttaaaaaagtcctgtttatttctcaagtaatttatgtatacttgttttaaaatgttctatttcctggtataacctaagttctgttacaagcatgttaagcaaagggtgcaagttacggacattttgtaaccagccacatggcaaactggtcacatggctgactggtagccattttgctaaagttaaaaaaggatacttaaaccgccatcttgactaaaggtgactgcatggaaattagaggtaccatcttagaaacaagtttttcagttaagatttaaaatgttaatgcttctatatattacagaagacattaagggaatttaaatttctttttaaaaccagtttttttaaatgtttgtttttattaatgtttgtacttaaagagcttcaatttagaattatttttaagcaaagtctgacaatgtaaagttcttgttttgtgaaagatgctaatctattataagatattacagtttatgtttttaaaagttaagtttaggatgttggcagcacacacctttaagctcagggtgttgatggcacacccctttaagtttagggcgttggtggcatacgcctttaatccaagcactcagaaggaagaggcagatggatctttatgagttcaaggcctgcctggtctggcagatcgaattccaggacaggctccaaatatgtacatgtagctactgtttaaggannnnnnnnnnnnnnnnnnnnnnnnnnnnnnnnnnnnnnnnnnnnnnnnnnnnnnnnnnnnnnnnnnnnnnnnnnnnnnnnnnnnnnnnnnnnnnnnnnnnnnnnnnnnnnnnnnnnnnnnnnnnnnnnnnnnnnnnnnnnnnnnnnnnnnnnnnnnnnnnnnnnnnnnnnnnnnnnnnnnnnnnnnnnnnnnnnnnnnnnnnnnnnnnnnnnnnnnnnnnnnnnnnnnnnnnnnnnnnnnnnnnnnnnnnnnnnnnnnnnnnnnnnnnnnnnnnnnnnnnnnnnnnnnnnnnnnnnnnnnnnnnnnnnnnnnnnnnnnnnnnnnnnnnnnnnnnnnnnnnnnnnnnnnnnnnnnnnnnnnnnnnnnnnnnnnnnnnnnnnnnnnnnnnnnnnnnnnnnnnnnnnnnnnnnnnnnnnnnnnnnnnnnnnnnnnnnnnnnnnnnnnnnnnnnnnnnnnnnnnnnnnnnnnnnnnnnnnnnnnnnnnnnnnnnnnnnnnnnnnnnnnnnnnnnnnnnnnnnnnnnnnnnnnnnnnnnnnnnnnnnnnnnnnnnnnnnnnnnnnnnnnnnnnnnnnnnnnnnnnnnnnnnnnnnnnnnnnnnnnnnnnnnnnnnnnnnnnnnnnnnnnnnnnnnnnnnnnnnnnnnnnnnnnnnnnnnnnnnnnnnnnnnnnnnnnnnnnnnnnnnnnnnnnnnnnnnnnnnnnnnnnnnnnnnnnnnnnnnnnnnnnnnnnnnnnnnnnnnnnnnnnnnnnnnnnnnnnnnnnnnnnnnnnnnnnnnnnnnnnnnnnnnnnnnnnnnnnnnnnnnnnnnnnnnnnnnnnnnnnnnnnnnnnnnnnnnnnnnnnnnnnnnnnnnnnnnnnnnnnnnnnnnnnnnnnnnnnnnnnnnnnnnnnnnnnnnnnnnnnnnnnnnnnnnnnnnnnnnnnnnnnnnnnnnnnnnnnnnnnnnnnnnnnnnnnnnnnnnnnnnnnnnnnnnnnnnnnnnncactagaaagtcagatgcctgtcttgtgacaaggagccaatcagaggttagctggtggcgctatgctttatggctctgggtgtgctttacggacaagcgcacagcaatgacgtagagagcatagcaaccaccctgggagggcctatgggccataacaaccagttgaccaatcaacacagggcaagccctctaagcctggaggcacaccaatcatgagcctgtgcgtacccctacacactccccttacgctgtcctataagatctcttgggaggccctaggagccgtctttttctagccatccgccatggcggatgggtgaaagacccgagctaacatggagttagctcgttaaattgcaataaagcctcttgcagtttgcagcaagctctcgaatccacctggtgattgaggtgaccgagaacgtggcctgggaccctgaatacttgagtgtttgggggtctaacactaccacatttggcctcttcatatgggttctggggaatgaactcatacccttgtgttcactaggcaagcatgatactgaatgagttatcccccccaggtctagattcgtctctgatctggaaggcaacagagctaacctacaaaaccatcttagaaattcatccagggctcaattatttgcttaatattaaatgttttatgagtgtattgctatagttagtagttatatactgctataaaatgaagtgttagctgctaaggatttcataatttaccaaggaagacaaaatactagtgaaacatgatatgttagtagatagaaaccaagaagatgtaaataaccccaatgcagggaggcggcattgataagaccttaaagaggtctcaggagtggtgatacagtgccaggttccaaaaaaaacttcaagttcttcagttcatggtggcagttctggtagggaagggggttcccagtagagggaggagaagcctctgtgaaggtctggaggtgtggtgaacagagtgcctctggcatctctaattggatttgactggggctcagggagcataatgaggtataggcagatagagttctggtcacaaaaaggccattctacctcttgcccacaagggaatctgaatgtgacagtgggggtaagaggtattaatttatatccaaactggaaaacaactcaaaatacaaggctggctgctgacgaattagttgtgtagatgttaggtcctatgggggctggtgcagaagcatggcggctgactggacctgctctcagacagtggggaggaaacctactaagtaggagtctttggagtcctactgtgggtaaacagctttgcttagagctctaccctctgggcaaatagcaagctgttttagaggggaagagactcagctgggggtagctggtgttggaagaaggagctgcctggacttgctcaggtttctgagttcacaagtagatcacaggaagctgagaaatcccaaaaggtaagtgtgagaagaaagtctgggcaaagccaagggggtgtttaaacctaagcaggtgagttgggagacgggtgccctgtgtggggtggtcaggagatggtatagtacatgagtccnnnnnnnnnnnnnnnnnnnnnnnnnnnnnnnnnnnnnnnnnnnnnnnnnnnnnnnnnnnccttccttgaaattgtagtaacaatagctgacatgtttctgagcttgtgttgtctcatgcatggttctaatacagctcaggctgttttcctccacgaaggggcaaacttatttttcactgtaaacctcatgcccaacctctagagaagattgagaaagagatatggagttcattggctatggttggataatttaaatctagactaagcaaggagagcagggaagggaggggagaaagagaatggaaattgaggatatttgcaatgtgtacaagtcatccttagtgtggagaaagggaaatatcacagagcacaacaatgatgctatcaaaactgttttcatggtctcatgaaatgttcagtagtccagatacattaatcacccacactcttgggcattacttcttaacctgctcttccagttgtcagctgcaactcattttacctcttggcattagaagaaactccatgttcaaacctgaagcttgcatctaaaagacttctcccatggtggaaaactgacacttgctttttctctggggttcatattgtgcagccccaatccagattaaagtccccctcctaaggtcaaggcacagtgagtgtactgaggctagaccagagcttgagaagataatcatgagtaaagttccaaatgcttccaacacatgattctaaatcctggtaagatgactgcttgattctattctcacccaggcaaaattcaggaatggagcaaaacacccctgtcaagcatgtgggagaaacagtccaagtgcccttcaaagaatctggatatcttggggatgggggtcaggatcttggaggagttggggtagtcaaggctttgtatctctccttgaaatgtacactgctgggcctgagacagaagttgctctgtctgaactttctctgaccttgagaggaaagagaattatgataaatttaggaagaacacttgactgtgtaacagaccctcaagtttcttcactaggaacagagaagtgatcagaccaagcagaccgacacttggagctattttgagaattttttttcttattatttattttgagaatcttaagaagatacctgccttagttgttggctattattgctatgatgaaacaccatgaccaaagcaactcaaggaggaaagggcttattaaactaatgcttccttatcactgttcatcattgaaggaagtcaggacaggaactcaaatacggcaggaacctggagatttggagttgatgtaaaggccatagaggagtgttgcttactggcttgctcttcagggtgctttactcagcctgctttcttataggacccatgaccaccagtgcaggggtggctccactggcaatagactgggccctctctttcccactaattaagaaaatgttctacagttttgtctacttaagttggatcttctgaaggcattttatcaattggggttctcccctttgatgactatagcttgtgtcaaattgacataaaattagctatctttacaatataagaggatgggagcagcaccatccatgctactccctgtcctacttatcttaggctatcaacttagcacagcctaaaatcttctgggaaaaatgtcttaattgagtaattgtctttgtcagttgggtttatagacatataagggattgtcttgattattaattgatgcaggagagctcaggccatggcgggtggcaccattccctggtacagagtcctgagcggtataaggaatttaatgagtgagccagcaagcaagcttcctccattatttctgctttcagaccctgtttgaactcctggtatgagttctcttaacaatggactgtaacctgtaagttgaaataaaccctctcctctattatgttgcctttggtcagtgttttatcatagcatcaggaaggaaacaatatcatgtcccacaccttgaataactacagagtgctctttgtgatcttggactgacctaagaatgggtaccttaaagtctacttttgcattatttttcatttctattctattttaaaaaaaacaaacttcaaattatttgagggtattattgtcttcaagtacccaaaatgttcagttcatacattcttgtgttcatatgttccacagttgttgataggatgtcttgaacttaatttccttggttctaatgacactcaactccccaagagacaggtggcaggaagatatcttagaaacacaaagatcctttattgcagctgtgtcaagatggtgtgaaggggacagccagaaatttcaggacagccaaagtctccctatagaaaaggaaatgaagaaagccctgcttttcacgtcttgttcctcttttctgttgactcagtcacagaagtttgtcagcttttcttgtggagattgaagtgggaagcaggtactagcaacactggccaccttcaagctgcctccagtgcctcatgatgggattagtgttgcaggttgagctttttagatatgtcagggtctgaggtgtgagggatattacacaaatagtgggctttggtatctgtcagggtgaaactcttgccttttctgtattgtttcaggataagataagggtgaggcttttgcttcacatccattgaaggaaaagttctttcttatctccagcatgtaaaatatgctttgggaatggactaggcatttcctgtcctcagcctgtcccatgaggaggttgatgagaagtaatgatggcttgcttcatgcagtggtctcagcctatttaaccaaatgatttggattgaatcttgtttttagcttccctctcataaaggtaaagaaattactgcatgatctcacccttggcctgcagccctgagctgtcataccagtaaatccatgatagcagagtcagcataccaaaatgtatcaaaatggctagacctggaaacaggaggccttttttccacacgaattttattcttaatgattcaagcctgtgattttcttctgaggaacttctttggtcaagtagggggagggaagagagaagagatgaagtggagcaggggggataaagccttcactaactcactcaggtgagtttcctcgtcatatcatcaagattcaggtggatgcatacctgggcctttgtgaagggcactgcacaaatgtgtgtggacctttcccatgttttagaagtatagccaccaaggaatacagctaatatttgctctgcttttgagtaaaacacaaaacagccccccttcttttggtactcctatgttttggaattctgcaaatctccagcctgctgtttgacttgctccagttggcatcttgccctacagcccttacccttgttccctccagtgagtatgccaggcagcatgtttgctttgcccagagcctccccaggggcaagcaggagcttgagctctttgctggatgcaagcatttcaaataagacctgcatgctcaacagaaccccaaggagctgcacagggggaatctggatgaagctgcaaccctggctccaccttcatctctcatatgtccccagtccctaatcctgtctgcccatgagcccagtatctcacccgaagttctgtcttggaatcacattgctgatacaagtgtatccagcttctcatagctgtaaacttgcataggtatttaaagaacaaacaatttagaaacatttggtggcctcaacctacatggtaacaatgcgatgatctcagcaggtgcaagggaataagacaggcgaggtgtgaggcagcttcatggaagagaagggtattttgcccttctgtgattcatgtactctaaacccttttaggaagtcaacagagacttctgagaacctcagtgtaggcttcactttcaaggcaggaagtaagatggcagctgactgccttcccttgctccctctgcttatcctttttaggctccgtgggatgaagggcagcagatctctctttagatacaaacccattgatagccctgcctgtgtgcagacccatatatttttcccaccttgccattgagaggaaacaggaacatgagctggttcatcccttctttcattgaccaaaggacttgtccccaaagtcaccattaaattatctcccctgtctccttcattgacagcttgtcctctgcaaagtgatttccattaatggaattcactctagtgcttcccatcttagctggcaatgcatttctctgccctagttttaatcaaagctcttccaagcatctttacatatttgtctagctattagccccctacattggtttaaaacattccactcacatctgtttctccaaccttctttgactctgatcaaggtcactaatgattttcatctaagtcaaaagtttgatcgtatcttttatgatgcccaagctatgcagtgcctgttcattcttgtctctaaagccccgtgctctactccctgtgtccaaagtcccttgatctactcctgtctccaaagtcccttgatctactcctgtctccaaagccccgtgctctactcctgactccaaagccccgtgctctactccctgtctccaaagtcccttgatctacgcctgtctccaaagtcccttgatctactcctgtctccaaagccccgtgctctactcctgtctccaaagccccgtgctctactcctgtttccaaagcccagcactctactactgtactgctgcgctctactgctttctcttcctgaaacaagctttattcaggccttaaacagcttctttctgcaccttgtttgaatctttgcttagggaggcttccctgacatcctagctgtaaatgaatcaatcccttgccatgcccggattcagcctctcttcctcaccctactctgccttccatcttagcactcaacattactgaaatggcctatttatttgtaggtcatcaactctagaacagagccactcactccctccacatccccagcacctacccctcagtaagaactatgagagcagggtccatgcctaaggagctagtagtctcactgggagtgatgctggtggtatggcccacagtatttatactggctgatcagactcttcctgaaggcactgtgactacagaacatgtctactaggctttggagacttctgtgacttgcctaccattacacagtggtcaacagaaaaaccaaccactgaatgaagaccgctctgatccagtgctgtgttcttcagcatggagggctttgaccttgaagatcaaactgcatctgaaaaggttaccacagtctgttcaggtcgtattcctgaggacacagcagttctgcccacttgtggacaggcaacacccgtttctgcttgcctggaagaaaagaacgctgacttcactcatttcactctgaaagcagtctttgtgccagaagccaaaacacacaggcttggtaaatattttgtacttggttataatagcaaggacccaaatgcagttagtgctggctcagtgagatactgttgtttaccagttttaggaaatacataggttcagcattggcttgaagatgacccttagctgtatttcagctgagagttttagaattaaaaccttcccatgtctttcagcttctttctgaagtcagcatggtttgttctctgtcatggtttataggcagatttggtgcaaggccctgactgtggagtccagggtctggggtcttccagcctgtggttaatgactgggtgaggaacttgctgtctagaagaggagagaggggcatgcaggctggctgagactggcaggctcctttctgaccagctgcagatgtgatcttaatatgtctaccaatctcattaaacaataaaaaaaacccagtgaaattaattttaacagcagatgtcaggtaatgcaatatactcaaaatatcattgcaataagtggtatctatagctatgtaatcttcaagtctggttgtagtttacatccacagcatatctgagattagctgagtggccacatatggctggtaacttttttgctagagaaggcatctcctaatagtgagagtgggtttggggtgctgagacttagatctttatattgagctgaagaggcccagttgaatttctcttggggtctggcagagagcaaatttgatgccatccactgacctgctatcttcacatttgaagacagtctctttttgtgcctttcctctctgaattaactgctttcctgcctcccccgctgtttctgatggtggcatcttgttcctgggaacagattccagactttcaatgtccattggaaagtggccacgtgcagccccagcaccctcaagtagatagaacccatgaattcttacattactcctggggcgtgtctgtcacaggttctttatcccacaaatgccttaccatggtttccatggcaaatcttgcttatggtctttgtatgatgtgcctggatatgagccatagtggacacatgacccctgcttcatctaattctgcagaatgcagagaataacattaaagaaaatgccacagttaaacaatgtgagaacatgctaatgaccatgacatgtgtttttttctcttagaatcagacattcaagacagttttttgatgcacgatctagtgtactaatgtaataggccacctccactaatcattaacaatttaaattttttttcaacacacatttttattctttaattactactcatatttacatatccatccccccattcccttgccctcccatcatcccaagttccccccaaccgaccccccagctcctccccagggatagtgaagccctccacaagggaccttcaaagtccatcatatcatttgggggagcacctaggccctccttgctgtatctgagctgcaatagtatccctccatagggaatgggcccccaaagtccactctagggataaagaatggttccactgttagaggtcccatagactgtcttggcctcctagctggcacccacattcagagggcttggtttggtccaatgctatttccccagctttatgactagagttccatgctctcactaggtcaggttaactgtttcttcaggtttctgcaccaccgtcttgtctcctttgctcatccctcttccctctccacaactggattccagtagtatggttcagtacttagctgtgggtgcctgtttctgcttcgaacagctactggatgaaggctcttcttcgagggaccatgaaatcttctcttggggtcctccttgtttcctagctcctctggcagtgtggcaatttttaaaaatttaagcaaactttgtaaaagcttttacatcaaaagttaaacatttaaaagaaaggtttattcatttttattttacatgtataggtgttttgcctgcgtgtgcatctgggtaccagatgatcatggagtccaggcattggattcccctgcaacaggagttacaggtggtcgtgagccaccacatcagtgctgggaattgaacctggatcctcagggagaacagtcagttctcataactgctgagtcacctctccagcccctgaagctaaaatttgagtatgttccatctacagacaaagccttgcaacttcagagcattctgagtgactgttcagtgacatggaactgctagatattttattaaactagtctgcatccatccatttgcattgtccttacccaggaagttcctgctcatccttgtgttttgttttatttggcaccacgtttaccatatttaggatgattcttaaaatattttcatcatatttcgtgatatatgtttgcatatgccacagtcagaggagaactttaggagtcggttctttccaaacatgtgggtcttaggaattgaatatagttcaattcaaacttggtagcaggtgaccttacggccaggcaggccaatttgggacaattcttgttttctcctgcactgttgtatgctgtccctttgtcttgagtgtgtgtgtgtgtatgtgtgtgtgtgtgcacccagccctcctgaattacaaaatgtgttaaagacatagctcagccctggtagctgatgtttgtagcaggtagaaagtaagtgctcagtaaactcttgctgattaaatacagtttgctaaagtaattgtcatcgtcaaatcatcatcactcctgatttaaaactgaagtgttggagcttgtcagtggccagcaaggctgtcgttcaaggtcaaagcttctgaccctgatgtaatgctgtcatcagaaaactagttgcacatgcttcatgtccttccctctgtttgcagctcctcaaaccgcaggcctttgtgatctcactgaagaggaaagctaaagtgcaagccccagaaaggaagacagtgccgaaaaggagcatctaataacatggaggctttgaacactgaagccacgcgggctctgggtgacccatactgagcctggcaccctgctatgcagggacaaacaagtcatttctagtcatctctcagcttcccatggaaaatcttgctagttagttgatatgctatgtttttaaattgtttatgaataatctcccttgctatgtagtctagcataacagtgatgataattaataaataataataataataatatttagtttgaatactattaattttgcctatacaaattagacatgtttattgttaaaaatttgaaaaaatataattttaatataatgtaggaaaaattatccctaaccaattaatcctttattttctttacaaatactagcaattctctaatttgacatatgtcattacattttaacataatgtgttgaacattttattaaatataatatatcaaatacacacaatatatatatgtgtgtgtgcatacgtatgtatatatgtatatatacatatatatatgaattctaaatgtgtatgtttagtatttccctgcatcaaattctgtaagtaatatggcagtatttattcttggacattaatctttgcactcaggactttttaagagacatttttcccctgatttatttggtcatatgctgtaccaggccttatgcagataaatccctacaactggtcccacgcctcaaggcgcttacaggactctgtcctcagaaataataggattaaaccaaggattagaagaatttctggctcctaagtactcagtgtggattggctaattggggttctttttattatctccccattttcttgctgtctgaaaagtagggtgagagctactttgaattcaagctggtcatcatctctgccgtaaaggcagtggtgactgacagaaggagggacagagacacagagacagacagacagacagacagagagggagggagagagaaagggagagagggagagagggagagagggagagagagagagagagagagagagagagagagagagagagagagagagagaggcaagatgcccgtacatattccttttagatcacagagcctctggcaggcctgcttctccaagttctcagaccatggctctctctcacactgataggccttaacatttagaggacacacacattacagatttccagggagaaagcaaactctgaccctccccgtctcagttgcaagataaaatgatggtcctacccagcgcctggctggtgcctgtcaggagttgagtagactagcccagactaaatagtgtggagcttcctgccactccatgaaaggatggggaagacaggatttccctgaaagcttgctccctccggtcttgttcccttaggcctcactatcattttgtacttgaaggctatctttcattactcttttaccttaaactgtattttaacattctcataaagttcagaatgctctctacctcaagacctccaggtctttgaatggaaacctctctttttttcatgtcttcaaggttccaccatattgtctctgattgatactgtgttccaccaagttgctctcctgcttcagagttgtcctacctcttaccccattgtttgcctccccctagcactcaccccatggtttgccccctccaccactcatgctgtggttccatggtttgccttacatctctcacccctgtggtttctaggctctcccctaataaaccccattctgaagagtgattgatctgagcttctttgtccagctccctccaaccctttggttataatagtcctctcttttcagtctgtttaactcagaagcaaaaagaaaagcaactacccaagttaacattgccctggggcagaagaatggctgtgagttgaaccagtagcttgaaatgcagttgccattatgacccttgcagactccaagaaaatgcagggatgaactcactgcattggaacaacatgctcagtgtcttgagaacaaacagacttttctttggtgttagttaaaaacatcttttctttctgcttattcagggctcaagaaggaagagctaacctctggaagttcaaggaaagcttgtgatacagccacaaaaccgccctggctgccactgtgagaaaacgctctgcatgtctgcttccctgaatggaggacaaagccattctgttgacagacagttatttcatttcagatgatttttcaaatagaaatcatctatctctcttccatccgtcagtctatcatgtatcttttatcatctatcagctattatttattattgatcataatctacactctactatctattaatttacctattatctatttatcatctatatctgtggttctcaaccttcctaatgttgtgaccttttaatacagttcctcatgttgtggtgaccccccagccataaaattattattaatattattgtttttgttttttcaagaccgggtttctttgtggctttggaggctatcctggaactagctcttgtagaccagactggtcttgatctcacagagatctgcctgcctctgcctcctgagtgctgggattaaaggcatgtgccaccaccgcccagccataaggttatttttgttactacttaataactgtatttttgctattgttatgtattctaatataaatatctaatagcagaatatctgatatgtgatccttctgaaagagtcattcaaccccaaaaggatctcaacctacaggttgagaactgctaatctatattttatcatctatcaattatctatctctctataatgtatcatctatctgtcacttatcatctatcgtctattttcatctatctatcatctcttgctgtgaaataactcttctctacactgtgaaaaattgctctcattgttaataaatagctgattgactgatagcaggattttgggaacagagagaatgctggaaacaggaagggcagaatctgaggagtctcgagccagacatggaagaaacaccataggaagttcatagatcagttaaacgagccttggggcaatacatagattaatagaaatgggttagtaagaactaactggatacaagcctaagctatcagctgagaatttataatgaatattaaatatctttgggagtgacattgggggacagagaaaaactccacctacaaacggcacccaaatgtctgacagctatatccacataagacctgagaaagctttaaaaggttcggaacacacacaaacacccaaatgctgcctcctagtttcatgcctcttatgccagccacgttatgtctcccagttgttacctgtaggcttgagctgccagcatgagcacatccagagtaagccccaccagcatgctgagaactaagccaaatggcaggtttaagttttgctcatatagggcagggcgtaggtggcacacacctttaatcccagcacttgggaggcagaggcaggcggatctctgtgagttcaaggccagcctggtctccagagtgagtgccaggataggctccaagctacacagagaaaccatgtctcaaaaaaacaaagagagagagagagagagagagagagagagagatcaaacaaacttacttttggaacaaagagaacatcttcaacaaatggtgctggcataactggatgcaaacatgtagaagactacagatagatctaagcctttcgtcctgcacaaaacttaagtcaaaatggatcaaagacctcaacataaacccagccacactgaacctattagaagataaagtgggagatacccttgaattaattggtacaggagactgcttcctgaacataacaccagtagcacagacactgagatcaacaattaataaatgggacctcctgaaactgagaagcttctgtaaggcaaactgaggagcttctgcaaggcaaaggacacagtcagcaagacaaaacggcagctcacagactgtgaaaagatattcaccaactccacatctgacagagggctgatccccaaaatatacaaagaactcaagaagctattnnnnnnnnnnnnnnnnnnnnnnnnnnnnnnnnnnnnnnnnnnnnnnnnnnnnnnnnnnnnnnnnnnnnnnnnnnnnnnnnnnnnnnnnnnnnnnnnnnnnnnnnnnnnnnnnnnnnnnnnnnnnnnnnnnnnnnnnnnnnnnnnnnnnnnnnnnnnnnnnnnnnnnnnnnnnnnnnnnnnnnnnnnnnnnnnnnnnnnnnnnnnnnnnnnnnnnnnnnnnnnnnnnnnnnnnnnnnnnnnnnnnnnnnnnnnnnnnnnnnnnnnnnnnnnnnnnnnnnnnnnnnnnnnnnnnnnnnnnnnnnnnnnnnnnnnnnnnnnnnnnnnnnnnnnnnnnnnnnnnnnnnnnnnnnnnnnnnnnnnnnnnnnnnngcatatacccaaaagaagcacattcatacaacaaggacatctgttcaacaatgttcatagcagcactatttgtaatagccagaaactggaagcagcctacatgcccctctaccaaagaatgggtagagaaaatgtggtacatttacacaatggagtactactcagcagaaaaaaaaaaaaaacattggaaagttgaaattgtaggaaaatggatggaactctaagaaaccattctgagcaaggtaacccaatcacaaaaagacaatcatgatatgtactcactcatatgtggattttagacatagagtaaagaattaccagcatacaatccacactgccagagaagttagtaaataaggaggaccctaaaagagacaaacattgtcccctggagaaggggaaagggtcaagatcccctgagcaatttgagagcatgggaagagaggggagggagctacaagaatgagaagggaagaagaggaaagatgcagaggtcatgaggaagcagaaaggttgagtcaggtgaagaatagaagaaaggatatgtgataggtagggttttagttgggggttggtaggggaggatgggagggagaagggaactgggattgtcatgtaattcaatcttgtttctaattcaaatgaaaaaatgattaaaaaaagctttgctcatgtagacagaaaaagattacagatacacagtaaagaaaggtctaaatgggggggaccttcaaaatagggtacagtgtgtttaaaatgtacatagtcttgggagagaaaagagaaatggtgtagacagtcataaaaatatttttaaaaaataaagtctttaaagaaagaataaagtaatataaaggaaaaaagcaacacaaagattaaaaatacatggggagtcagggtcctgtatgtttttgtattgtctttattttttcccgcttactgatgaaggaacgacagctgccaagacacattggattataaaaactgctggattaaaccagcctatatatttttaaaatgttttgactccaaaatgaaagtcagaaggtatgttactttggggaagaggttatgctttaatttccacaggaggtgagaggatgtgaatacattacaggttaatatggatcaggtttgatcaagaaaggccccctgaaaattatgtctacagacataaagaaataaacctgaaagaactacaagacacatgatgtatattttacctgctcaaacatcaaacaaactatcatctttggctgacttatgtgcaatgaacagtctatacttgtattaatgcaggtatgaatgttacctttataagtttatgtatttacagagcaagggtaccagacaccaataaaatagatagctcaggtgatccagcatgaaaacatcttcaaggctgctgactgagatgacccagcctctcagaatactccagccaagacttaaaaaattatcctgattttctcaaggtttccccaataaacacctagtggcttctgaactgtatgcacttgttcatgtgttttctgatctgtattacttttcttaccttagttttagaactggtcactcttcccttcacttcaatttgttgagtgtgtggatgggtgtgcctgagtgtacagacacacacacacacacacacacacacacacacacacacacacacacggctggctgttttcaggtatcataataattgtgaagaaaatgaaatggccatgaagaggtgtgaactactctgactgctttatactaaatagtctggggacactttgtctggtaaagtgagatttgatctgagttatgatagtggcaatcaaaacagagagttggaggaagagcagagaactgcaaatgtatgggtgatggaaaagcagcactggccatttggccaagagaaagaaagccagggtagctgaagcagagcgtgagaaggaacattgcataggttgggtcagagttttgtggaccatatagagaccctccgatttcagtctgtatcatatgtccaagacagcgtccttgactgaatagaggcatctcatagtaagagttgcattataatccttttgtgcataattaattcaatgtacttctgttcaggagtattcatctgtctatacaaggcatttcccacagcaagatgaggaagttacagcttgctgtcagtgatgtcatggatggcatgggagatggacctatgctattacactgaaaatactctaacagtgtttcagacacaacttcagacatctgtgtttctctgcaatagccataaatcaggacattattcaacacctctgattccttctagagtctttcacatcactagccctctgctactgtggcaaagtacctgaaagagtcaacctataaaaaggatggctttgcttttgttctcagtttcaaagtttcagcctttcgttctgtgctgggcacatgaccaatgacctacttccttcagtgatagcccacctcttagacatcccaccatctccccacagcaccgccagcaaagggtcaagcctccaacacaggagcctctggggggatgttccagatttcaaagagtaaatctaccatgtatccttgtgctcgcagtcctgccctcttttggagcgttctcattaccgtgtagcagccttctcaaaacccaaatgcaagtaactcactcaaatatgtgtatctcaggttacagtataccaggggcccttgcaagggtttgtgaaataccagtaaataaatatcacttgccagactaaaatcctctaatagctgcatgaagtcccaggacatagtataaactcatcaacttgtactgcaaacttccaaggataatagtataaagggaacctgaataccatttgtcaggttataaatcaaggtctccaatgttccctccacccttccccgcctgaaagctttgacaaatgtaactgcaagagcctggctcaggtttccagattcctcagaatcccagtgccctggtgctctgacccctggagttcttgtgcaatctcatttctctttactccactctgcaggaggccttgttctccaacagacagactcctcagccctcacgtccaacctccatctactctccctgaaacagccacctgttggtcagctcttgggtgtacacagttcccaaggttcacaggcagcatggttccagattcgaagcctactgtacaaaagacattatctccagatgggcatttcctctggattctggtaaactcttcttcagaccatggtgaggaacactcttgaagaatagtcctagagagttctgggaagtgtgcatcccagaattaactccctgttatacttacctgagagcagttctgaaaaccttcttccacagggttcttagcccttgactacactatgcaagctcagttccaggaagtttgtctgtcgtatccctggtatccctcatgctttactgttgctgttatctttgctgagcaaccttccacatacaccccacagctttacctaatctgtttttttttttttaagtttcaagctaaatgtccctttctgtggaatgattttcctgtagaagcttggtgtgatggaaatatgtcctcaaattctttgacattcctgtggagaagtggtcctttaaatctgagtgggtttgtgactcaaaagaaagcaatggatgtgacaccaaatgactctgggtcaggtcatcaaaggacactcatcttctatttttcttgctggaattccttcttttgcagccttgaacttgtaaataagaagccccgctgctttgagccttctatgacaacaagtcggcatctcgatcaatagtgacgtgtcatctcagtattccagcagtctctatgaaggcagagacaagtgagtggggcagtctgggatcctacatgccactgcatgtctaggatgtagcgtatcttgatttgtaagcctctttgctgagtaaggagctctaggactcttacgggcatggtgattgataggactcacaggtggctgttgtgtttctaagagttccaggagcattgcctcagaatggtccaaagtccaggattgaaaacagctaatcttaaagtatgagtgactgtggatctttgttgaaattaattccataaatcatcacacaaaaaactaatatggggccagaaagatggctcagcaggtgaaagtgcttgctgccaagtatctgggatccacatggtggaaggagatagccaattcctttaagttgttctctgatctctacacttgtactgtagcatgcccccattctaaatattaaataaaaagataacaaagaaactatactctcatcagaatatggtgccctaaaattgctttgtttactcctaatgcttggtacagcagttattaagtggtagcacttttagaaggggatcaaatcatgaggatgggaaatggctatcatagacaagactgcggccttatcaaagggcttgatggaatatgtttgctcctctttgttttcctgtgtgtgtgtgtgtgtgtgtgtgtgtgtgtgtgtgtgtgtgtgtgtgtgtgtgtgtctgtaacagcaagacaccattctgaaagagatgagtctttgcctgacatggaacctgtcatcgctgtaatcctagacagtcatgttgtttcttaatcttctgctctcagatattttgttaaagcagaacaaatgaacctaaacagaaacccatgaagcttttaagtgaattctctgtgtgaatgaaacaatatagaaacagtacagggggcaagacagcacctcaaaattcccatgagtgggacacacagtgagagatgtgtttggctgcagacacaggctaggttgattcagaggggaggaccaagaacctggactgttgagtctcgggcatgattaaaccttagttaaggaagtccgtgatcccagctgagctgaagtgctatgaattggtgaacatgcaccttctcaagaatgtctgtgtgcatgcctttccccttccatcccatcactgtctcttcggcatttggggggatgcagacagaaaaaagttatttcaatttataggccctcaggatcagagcagtggtacccaaggaagtggacctgatgagactacacttgatcttaccaaaaatgccaagaaacgatgacctgaccagacttaatgacttctgagtcagttttggtggtgagactctaggccttaggcctaaatctgataaccataatagtgaaggcatttagaaaggaatttggtgtatatcatatattaaataattgacgatactggagatggctatgtaagttttatttattatttattattcctctatcaagaaatgaggcatacatctatctcctcttcttagacctggaaatatttacatctgctttggctaacaaaacctgatgatccccagggagccaagggaaaagatagggaagctgccatgcatcttatagataaattagtccccagagcttccaagatgagccagtgacccctcttgtcactacatggaaggaaagcattctctggctggctgttgtccaaattattggtccacaaatgaatggaatataaccaaatggttattgtattaagacactaaatttttggtaatttgttacccagaaataaattgctggttagcactcaaagctgaccttaagaatccctgtctctgtgtgtctgtggaacattgtcctcccacacttcagtgtaattatttcctaagaatgaggtggtgctccacaccaagaacaaaggcttgcagagcaggtaccccatttgttatcctctttgtttcctgctcctatccaagaagctgccctgactcactgaacagaaggctggggtagggccacttcctgtgtgctttgtttgcttctgtgctcccagcaagctaagtcaggtccttcagtttccatagtgtgctgtggcctgtcctgactgcagacattcataggaggggcattctccaaaataagaaacaggtccagggtagtcagttcctctagaaatacacatgggtttaagactaaagtgggtaattactgtgcagaaacatgttttgagttttgcctctcccagaacctttgaaaaatagaacataatgtgtagccaaacccctagaactcctgggcttgtagatctcaaataatcccatccagattcacttactttcatgcatttctagtttcaagattttttttccagtttgaaaaacaactccttgagagaattgctcttcttgagcggtagcctgcttcatactcccagagctctatagttacctcagaaattacaggtactgaccctcaatcttctagtctagaaaatacacacttgaaatgtatgatgagtctacatactgagaaaccctggggtaatcctggcttcagtcccagccctgccactagccagttgtgtgactcccagcaagtgctgagtctttctgagtccatttccacaaaagcatacatgaaaaacagtgtcccattcccaggtcattgcaagtactagatgaactagtgcatgccaaaccttcagccatgttgtttatgctaaaactgttagtgaatttatgatccctagtagttactttatgaaattcctccttcctttgctctttgtgtgtgtgtttgtgtgtgtggtagggtgtacatatacatgtgtgtgcctctgtgtagaggccagaagccagaagccaatgaattgttctccacatgattttctgagacaggcttgttcactgaacttggtgctcacactctccagtcagcaacctccgggagcctcccgactctgcctttccagtactaggattactgattcaagtcaccacaactggctttataaaatgtgggttctgggcatcaaactcgggctctcatgcttgcacaacatgtgcttaccaactgaaccatctatctccctggccccatttgctccctcagtagaaagttaaccgacatgacacctcctgaacactgtatgactcttctaaaacattgaacttgacaccattgtcctggaaacacattactttcttgctttagattctaaaatctagagtaaagcaccaaactagaacttggcatgtgagggaaatgacactaaagaagaaaagggggaaacatccccatttctctgtagctcatgatctaccccattttcctgagctcactgtctggaccagtggttgtcaacctgtgggtcacaaccactttgggggtccgatgacactttcacaggtttatctaagactactggcaaacacagatttttacattacaattcctgctagtataaaaattatagttataaagtaacaatgaaaatgttatggttgggggtcagcccaacttgaggaactatattaaaggatgcagtatttagaaggctgagaaccactgctgtagacactgtcaggtcctgatatctgtagtcatatgattttgttttctgaattgcaagtaaggacccatggtctcacaaatgcaagagttctctctctctctccctttccctctccctctccctctccctctccctctccctctccctctccctaggtgacatgactcaaaattttaaattgagattgcaccagaaaaaaagtgtaggacatatgttgaccatgcccagagttctcaaagccagatgctgcctggctccaagaggagaaaaccaaaacaatcagaaatctcctcttttgccaaaacaaatgctgcgtctctccagtgttattcctgtagatatcttcgtttggattgggcctggtccctgtttccactctgctgcagttctgagatgagagaaagctaacaccccatgttcactctggttagcaacaaattcctctctgggtgaactttaggagttttggggttcctttctcgtctttctcccacacagggagtcttcaactgtactttccctctgactcttaatgactatcaatgctatcaacaacaataaaaccttgttaccaattttagggcgtttatcaggaacttgcttttaaatatatttacctctcctagtggacttagtagtaattgttattatcttatagttaaatgcctcctacttagagatgttcaattcatggacttggtaagtggtggagtaagttagatatagttttctgagtcactcattctcatcagcccctgtttttttttttcccataaattgtcttggagacatgagatgtatagtcagctaacctacacagatcgactacctgttagaatgagttaaaatgtctaatgtttaatgtctcacccagtcctcatagaaataagaatttttcttagaattatctaatttttaattcatgggccaagaatcaatgttgttgttgctgctgttgatgatgatgatattaaggctcaaaaccctttctaggtctcagtagatcttctgttagaattctgaatggacttgtgcagaaactcaaatatcaggaggagggaacaaagtaaatagaaagataataatatcttcctctgcagagtccaaacttcaattttggatgagtatgtgtcagatgctgtgacaaccatgtaaggcaaaccaccaaaggaacaaggttgctgtccatggggtccttcttcataaatccataaatttaccagtgaaattagcactctcattacccagtcacctctcataagagctctcccgtggggactgaaccttttggtgggggcaaacaaagagagcagaaagggagggaaactaaggaaggactcttagctgtgggttcagtgccattaattctcagcactgtgcgaagcttatctcagacattctcaatgaccttcactttagtcaagagtgttgattccagcaagcatcaagtcactgacttgagttttatggaaaaagatgaaaacacagagcagaaccaaaaggtggtggtggaggattaaaaaggtaagttttagaaaggttaaagccaatttcatttctgagaaacagaacacctattgttaaatgactactgtggctaaaataggaaaaatataaaaaactaaaatatgaatttatggatatctggagagacagcacagtggttaagagcacttggtgcagccatggggaccagagttcagaacccagtactcttgtgacttcaaatctaatgtgggcagagacagaaggacattagagattgttggcttccagactgagaaaatgggagtccccaaattcagagagagactccttcaaagggtaagccaagatagaggaggacacgggaaacttctgctccctgtatatgtagtcataggtaccccacacaagtaaatacatcttttattaaaatattaattttcagctcagttttttagagaccccacatctcctctaactatatggattcccaagcccatttaaattgatatgggcaagcagtaactcttgcttgtctacttggaccttaggtcttaaatcccaaacattctcaacagcgtctagttatagattatgtgcactcaccacgagtgcatgggatacacagaaaacctgacgggtcaggatgaggttcttctaccaccccactctcctgacattgatattgtcagtttttctatctttaattctctcattagatgataaagtgcattttttaaactcaaagtacaccttaacttttcccctatgttatcagtgtctgagggagcacacaggttttaaatgtcctttgaattgcatctacatacttggagtatgtatcagcaagtggtggtgtgtgtttagactgatttcaagttgtcaacagcacaacatgtagtctgcatgatagtcagccattccatggtacttgcttcttttagcataccttttgctcagtatttcttgtcttttcttttaagggacacggtaatggcaggtacatgttaccttgtggtaccatcttatacttacctaaggttataatctacttctgttttaatgaagatgtcagatttgtctctctcccctatgaaatagagcatagaaaagtgatgattgataaaaataacatatgagatttctgagtctgctacacttacaaaataaacaatttataaaccttggatatttacttgtgatagtaatttgttgcaagaataacacatagttataaaatcactgtttagctgagcctggtaagaaccctcagatttctgagtgagtttgacatccatttcttgcttaagattccctctctctctttctctctctctctctctctctctctctctctctctctctctctcgactcacaggtggctgttgtgtttctaagagttccaggagcattgcctcagaatggtccaaagtccaggattgaaaacagctaatcttaaagtatgagtgactgtggatctttgttgaaattaattccataaatcatcacacaaaaaactaatatggggccagaaagatggctcagcaggtgaaagtgcttgctgccaagtattaaactatagatggaaatagtcttcattttgaaaaggaagtagaataaccactggggatgacagaataagtcatcgccacccctgtgcaggattctgatgctgtttgtgtgactcagccttcccaatgccccaaagctctgagtcaccacagtaatgctgaggagatattgatgaactttttattttctcagatgagtagttcagctgcctagtttcttatctttgagttatgaaggccacaatggacattttacttaggttacatgcaacctaagaacacgtaagagtgggtgactgagatacccaactacgagttgacatgatctgcagagaaagtatactgtctgaagtacatacaggctgggagtgtcacatcaggggggtaccattgtgtaggtgtgatcaactgacaaatcatcccatctttatgagtcttaatgttgcttctcaagataatcatactcagatgatatttacctgtctggagattttacagcctcctttggttggtgctttttgaccacaataacagtattaagaccagaactctttttaagggaattaattttattgattaagtaaattgttcaaataccaagcttggatgctgccagctaagggaatgaagagaactagagacatccacagtgctgggcctggctcttcatcttctgcctggccttttcttctcgtaagacaccattccttaccttagatgccttttgtccattaccttagtttcctttcctttgtgctcttgctggcagttggactacagcctctcaggccagccttgtaacagtggcagaagcttgagggatggaagcagagtccagaaacagctatgaatgcttcctcatgttcatctctttctccatttttaaacagtgcaagatcaccttcccaggaaatagtctaacccacaaccaagctggatcatcctacttcaggtcagtcaagataattcccgacagacatgctcaggggccctcccaggtccaaatggattgacaattaatattgatcatcatatccgtgtgtgtgtgtgtgtgtgtgtgtgtgtgtgtgtgtgtgtgtgtatgtgtgttttttttttgtagaattagaagatagttttccaaaaccaaaaaagatggtgacattggctaacaccctcagggcctcaggctgctctgaggaatctgagagacccagagatttctaagggagatgcagtgggggaatgggtctgcagagcacacagtagctcgagaacaacttaaaaaaatggctggtcttatgggaagacacttttaaaatagtttcataggtttttaaaaacagatggtagagcaggcagcatatactgcagagtggaactggtgagtctcaagcagtaggagccctgtagtggacaaaagaacatgctgttaatgagtgggttgggttcttgggccaccagctttctgctgctcaccctgcttgcagggaggagagtgcggaagcatgatggtcatgtcaaagctgccagcagggtgtctggagcagagagcagggtggtatatagcagccctgagctcttgccagtcctccagacatgctgcccaaccacaaggattctgcacaacaagatatctgagatgaagaatggtttattttctggattaagtcttctcaaaagacttccgtggtctgcgctgctgcaggaggccttgctggtgtctgtgtgccatgctgcccccttgggccatattgatgtccatgatccatgctgtcactggcaactatgttgatgtccaccaaagccatgctgaagtccatgatctgtgttgttgccggatgctatgggcttggaagtgtcttttacagtgatattgaagactgcaggctcattactgagagggagagacattgaaagcctctgtgacaaacactgccccacaaaacaagaaacccacaggggtcatggttcacaggttgagaactcctggcctttgccaaggaagctgtacctataaaatcttaactaaatggtttcctaaacaaaaccagagcaatagtgacacagctggcacacccatgatgatgggagaaatctcatcagcaccatcccttgatgctactggaaaccaatggctgctgagggagggagattcagtcttctctaaagatggcctctgataggttatctaatctgagtggtcagccctaaccacatgaacatatgaccaacactgaacgaactcagcaggttgtatttacatatacatgtgtacacatgagctcttgtgcatgcttgtgtatatttgtgtgtgtgtgtgcctgtatgtgtgtgtgtaaaataataataattaaagaagaatggctcattcatctaagaaggaattagggaaacatgagaggagttatatgggggacagagaagggtggaaattatgtgaatacagtacttctttatgaaattctcaaaaattaaattaagaaatttaagagacaaaagaagtttccctcagaaatatttattccaacagacttctcagagctggcccctatttccgaggaattactgagggagagactatcgaggttgaagctggagaggataaaagaatagagctatggatataatgcacacatcagcatgtataaatgctatgaggtggtgcattaatattaacataagaatgtgtctgcacatacacaagacactttcctggtggccgtccatctcttcctcaccaccccatctggaacccagggtcacagatagaagccagagatccttcttttgacttgggaaagcaaaatctgggtgtattcagctttgcctggccagtttccatggccacatagcagggctnnnnnnnnnnnnnnnnnncaccccctggcactcagcagacggttaccttccactgcagaaaactgcagactgtaggctaacaggaaacatacatgcaagcattcgaaccaagcttcttattaagtgatcacagtgccggttagtattcatttgaataatttgcctggtcgtctgtgggctgtgtatgtggaatcagattttccttgcatgtcacattgttataaagttcccagcttgccacaaaaatctgtttaccacaggaaccaggcaggtttctgctgaactttggtttggagaggagatgagattctccgtctgcagggtcaaaccattgaagcacccgagtgcaaaagaacaaatagcccaggttcctttgtgaaattcatcaaaacactaggtgactaaaaagcagttaccttgaaatgcagcatagccacagttagagagaactacctagcaacggctcacagtgaaaaagtatactacaataagcaagcatgacaccaatttctgctggtcacagcataggctgtgacatgagaagtcatggttgacccacaatcttctggggtcagtgtcaaggaaaccaggtgtgacaaactgcatacccagcaactggcttctgctttcaattctgcactaatattatttattttcttagtatttctttggacaaaggctaaatgcatatatatttgtatatgcagattatatgtaggtgtacttatagacatccagatgaaacacaagctactgttaatcccaaagatgagaggagaaaaaccactaacccaaatcatcatggccaaattaattaaagcaagcctttttattcatgtacatgagctgtgtcccgcctaaaagtgaggttcaagagatctgcattggatgtgaggaagacaaggtttttatagctctgggatagggggcttccaaatgggagatttgacaagcaaaataggcagggttacaggagcaaaacaggcatagcaagttaatcataacaacctcctgaaacaaaaacatgtttgcaaaggtggtcataacaagtgtagtcatagcaaccttttgcaagatggccattacacctttttgaaacaaagacataattgttgtttcctggaatgggtagtacaaagccttttaaattaaggttacagatgggacatagttcaatctttgagaaacaggaataaacctggtttgtctttgctataagattgcttttaagcctaaaatggagacaggctccttcatcatagaaaaccccacctgaatcagagtaaagtccaagcgtttctctctgtctctgtctctatctcccccacttctctgtctctctctacccctttgaaatagtatctcattgttccaagttggagtcaaactccctctatagccaaggatgagcttgagcttctggtctatctgtgtccacctctgtagtgctgggattacagaaatgaaccactatatccagtttgtggagtactggggagtgcaaccgaggactttatggatgccaggcaagtactcagccaaccgaactccacccatggccgttccattttccttgtaagaggatttgtaaatgagtcctttcaagccctaatctgatgtgtccccatttgtgttcacagcctgtctaggggttctggggtttctctcatcccgtaggagtcaaacttctagctatttctgctaccattggaattctggcctagggattccatttgacttcattccttcctcacttccttcatcctcccccttttcccatcctccccttttccctttttcagacagacacatttcctgttctccaggaaggctacatctgcctttcactttgcatgtatctttctttgctctatttcatcaggaaaaggaatttacagcgtcattctgacttgaggctttggccttgcccttcaagacaccctgtgcctttgcttggaaagtgctgctctgctcccttgcagcctcttctcttctcttctcttctcttctcttctcttctcttctcttctcttctcttctcttctcatctgatggatagagtttgctgccctccctgatgagatccacacagcccagtccacagcagcaccttcttctccctgtctagtggaagcaggagagagaagaagaaaagggatgagtttgcatatttttcttcattgatttatatcattttcaagcaatctgtattttctttgctcatactatcaagaaatctttttaaatttactttagaattctgccagaatttctctagtctgtatctcctgagatctttctctgtcttttgaatgttaggacagtgtgtgcttgtaaacttttaaagctttgtttattcttattattgaaaccatagccttcaaccacggacaggaaattgagggagagctaaaatgattatgaatggtcctcagagcagcacagatcagaaagatccacatggcacactcctttaatcccaggactcaggaggcagaagcaggcagatctctgagttagaggtcagcctggtctacagagcgagttccaggacagccaggacttcacataaaagtcctgtctcaaaacaacaacaacaacaacacccaaacaaacaaacaaacaaacaaaaaaacaagaaaaccaaccaaccaaccagccaaaagaataaaaatcaaggactcaacctcaggacaccttatggatttttataaagtatatattgttatatttaacatatcaaagccaatgctggctgcctggctttccctgtactggttacagactcctggctcctcttagcactttttgccagccccctcctaaccctctgcttcccttcccccagcttctgggacatggcccagctgaccaatcacctcacacgaagaaaagacaagtgatggacagggaaaccaatgatcctcaaaatccctttgtagatactttttgctaaaagaggccacttttgtgtacaaacccagaaattcaaggtagctgagagtcttagtcataccagaagcagaactgctagcctaaattctctacttcaaatggtaagagtaaggcccagaagtcagaggaacagcaacgcataagactgggacttgggaggacacacaaaaatacactgaaatctccaattacatgtctaatgtgtgcttttgagttgctttgagtcagggcaaagatggaagcagtcctttggaatccagagaaatgataaagagcagctcctgggctagaggcacagcagtgcttggcgtgtgtgagagtctacatttgattcctatctcccccaaaataagataaagtaaaataaaaataaggaagcaaaataaaataaccaaaagtaaaaatctaagacccatacaccatagggacagaaaacatgtttgggggctgtctggctctgctagcaaattggttagctgttaattgtttctttaagggagctgcatgatgggaaaatccctaaggttttatcttcatcttccaaatcttctaaatctccaaatcaaaaccattaacaatgaaccatgtgtcttgatagagtggagccatttgccaaggaggaatcacacaatgctctttccttcctggactggccacacgtgaccaggaagaagcagagctgggattagccagggtggccctggggttgccctccactgcatgtgagagttcctgtctgtttgtgtgggacatgtggtgattcctgcatattcccttaccatgagaacagaaaggaatcttcctgattcagttttcctatctatatcaaacaaactctttagaagggaagattgatcaataaattgccgtttagtggtgagttaaggtctacaaggcatcatatctggccttgccctaaaagaatgcttgcagcctagatagccccaaacagacacaggaaaagggaagacagtaactgaatttttccccttgtagaaaagagagtcctttctttgatgttgtacacgcactaagggaaggcatgtctggtgactgagacattgtgggccatccagcatcattctacctctcttcctttgtgaaatcacccttgttttataggaattctgttccatcctgtggctgaagagtgaccaaatccttttcaccagccctagggttgggttgttgtgggccaacatcctccatacccatgactagagtactctgtaaacagatgctcatgacatacacgtaaggttcctcagtcttcccaaggcctcttcactgctgcttgtggttaatctattcttaaacatcaggagaaactgaactgaggagctatggtttgtaactgaaatttcacaactcacactcggtttcaggtaaagggagtatttcttaaccttcaatcttgaccaagaaaggatcagacccttctaagttccctgacccggtagtgatcaattcctgcacagctgcatctaccaaaaggagactccaaacctcatctagtacagtgggaactctagattcctggagggtgtcaagtccaaacaacactccatgtggcagaggaagagccccctaagtcttttggagtgaggaacagtagatgggggagtttgggggtcaacagtagatggtatgctatgctataagagtaagatcttactcattccccaaggttccattaaaactttaggcaaactcatcttgtaaagcagaagctgaataaaattgatgggaaatggctttgctaaaattttaaaccttttatttcttttgagataaagattcatgagccaaatgctctgagtatcggtgggtaaccttgaacttttgcttttcctgcctcagagttgtgattgaaaacatgccaccacttccagctagttgcaactgcttcttggagtcttggttgtttaacttgcctcttctggcctagtttgtctctaggttcagtcgtcattgtttaaccctctttccactgggcgttaaaccatcttcatgttctaggtgggaaatgcatgttggcattactaccctcatgtaaactgatggagattattgctgtttttttttgttgttgttgtgaggcatctgaataaaaacatgtaattcctgaaacaacttagattttgagaggtgggacatttccttctgttgctcttataaaatactagtgatcatgcctatggcttgtgaagttttatgggaagccacgacaagaagctgcagtatggaaggatgcttattaaacctgcatacattatgtatgactatgcccttgttttgacctcctcccctggaaccctcccaatcctgattacaccaggctgagccgtgaagctcagaaaactgtaaagccctttaattggggcattaggagtttcaaaataccagttcaggaaagcttctcaaggctttatgtttctcaaaatatataagccaagttcttgtaccagtgccatgtttctctaccctgagaagatggatgcacagtcaacactgtgtgtgtcaggcaggcagcctgtcaaaaccagggatggtacacacattttataaaaatgcaaggaacaagcaaaactagggaaatagtaaatggtagagttgaactccccattgggctttaaactacagactctgaatttcctggaattagagaagaagatggaagtcccataggaagaacaggtgcttttaaaagacacatttaaaattcttacaaccagctggtttggagttctggaaggagccttggtctttcatcctggtggaaggtgtgtttgcctttgagtggaacagggatgaagagctacatgccatctctgagagctgaaagctcccatttgatgagaggggatggcttacatcagccatggcacagcagtgtgggggtggggttaggtggctgaaccacccacatctcctaatcaatcaccttgatcagtctgatagtcaccccttgccctctgagatcccctgagagatgatgcagccatgttgggagtataggaaggttgcaccccagcttgttgtacataaacacactcccgcccttggctaatgggacatttagtttgggggtttgaataccaaaattagacactagcttcaaatccctaaaaatacaatttagaaaaatgagctttggctttgctgcctatctccaaagtgtaactgagctatttcctaaatccatatctaccctgtaatcattatctagttaaactttcctatgtagcttttattttgttctataaattagttagccaaaaggacccttgaagaaatgcattttatcatctggtttttcagtatgaattaccaaaaatgcctggcacggtgcatggtggtcaggagaggaatgagtcagtccagaccttcccagagtttggaagcaaaagccacaagtgtacacccaaaaactaggattctagttaaaaatgattgatgattagctcctcttttccctcaaatcctgctaaaagtatggttggaggagatgaatgcacaaacacagaaggagaagacacaagcaaacgcttacactcttggaataaagaaaacagagccatgctagtgggacagcccagcagttgaagcacttgctgcgtgggaaatagaactagagattcctaggacccagtaaaaatgccacctgtaattccaaccacggaaggcagacacggggatccgtggaacaagctggccgtggagactaacaatatagagttctggctttcactgagagactttgcttcaatgaataaagtaggaaaggaagaggaaggtgcatggcctgcctaagcatacagatggacacctgcacatgcacctgaaaacacacacacacacacacacacacacacacacacacacacacacacacaccatctcagggccagaagggaatgaagaagttgttaggagcacgccatgggaatgtggtggaaacactgggcaggactgttttaaatttgtgaccaccagccactacttttaaattttcagtactttctttcacccttggggagaagctaattacaacacctctttcacccttggggagaagctaattacaacaccaaatgcatcccttgccttccaagactaaaggagcaggggtgggtggggaactcaggggactcctttccatggaaggtatcagctccatttgtgcccaaactcagggtaaagtgagctggcgccttccacagtccatctgttctgttagcagcaggcttcaaaataaaaataaaaaataaaaggcttctttagagtgtaaaatagtaaggccaagccaggtggcgggggcagccctgctgttcacatctttcccaaacctgggccaaagttgccaaaagcaacaggaagggagttttccccccaagaatttacaaaccacataaaccaccccaaattccctttggtgtgccccagctacccagcattttccaagaaggcatctctgtgtgtttggcatctaaacaaagactctcagctacaggggaagaaggtaaggccctgcccctgtctgctaaagagggattaaagacctgtggtttcatttttgagtttttccttctgaccccaaccataacatttgagaatgttcagttgtgcaacaagggctagtgagtaggtggagtttccatttctgcttttttttttgataattcaatgggaaacagattaaatattcatgtctccccccagtctctatggaggccaaaaaccatcaggctgcacatagagattgtggtaacttttcaagagaagtagagcagatagaatcctaggttcaaactgacatcaggagctaaatttttattaagatatttttccaatttcatatccattgctggcaatttgtgaaattcggagacatgtaaggtggatagatgggtgctggatgctgattgacagggtatgtacgacagggatgggaaaaaggtcagatggtttatcagccttctaagcagggaagtctattagagtgtagaccccaagatactggggtaaagtttaattgattatttggaacacttaagcttgtagccaggtctagaagagaatgggcaaggaaggctaaggcttaggagaggctcagaattggaagcctgcctcaggcatacgcagagaaaaccacaagggtgcatgtgacagccagggctgacatgaagggaaggaagagagtagagagaagtgggaattcacggagaagaggagatgggacgtccagagaagtcgcatgagaactggaagagaaatgagaagatgatgccagtgagcacagatgcttcaagatccgtggttgtgaaagggagagcagcatgacggggtgtgtgcaggaagcagatccaagagagaagatgaaaaatcctgcatggagccatcacaacaagcattcaaagctgtgcaaagggatcctacggcactgggctcggcctcttcttcatgctcctttgttgaagaagcattgcttcttaaaaaacatttttactttttctttgacggtttcatacatgtagacagtgtgtcttgatcatgtgtccctgtcacttccccactattcacctacccagcacatcttattcccaccttttttataacttatgaggccaatttgtgtccatatgctcatgggtttggaatcttccaccatagtaccggcagcacatcagcagccacagtcccaagaaaaatgactccttccacagagaccatcagctgctaatagtgcctcacctggtgatggagcctcataagcacttttatccatgtagcagtgctgactggcttgatcttacacaggtcttgtacaggtaactacagtagctgtgagttcatgagcatcacggctgtgtcatcttcagaagaaagtatttcacagcaattctccccgtgactccctgacattctttctgtcctttcttctacgatgtttcccatgtactggggctgggagtaatccatgcagatgccccatttaggactaagcatgcaatagccactcattttcaccatttgagcagttgtgagtctccacatcaacctctgcctgctgcaaaaggaagcttctctgactagggtgagaggatgctaagttttgaacataagcatgaatgtttagaaggaagtctgacagcggaggagactggactgtctaaagtgaacacggcattctctcagcaatcatgcagcttggcattgccgcacacaggcagggtttggcttcttttagtcatgtgactagtaactgtcagtgggctctccatgctgctcagctgccatgcttctgtgactgtcctgtgacaacctgccagccccttctcctctgtcctcactttcagctggagaccttcatgagtcaccaagaaaacagttgtaaaataatccccgctttcctgcaaatgacagacttcattcttcttgatggctgaaaaagaagattctattgtatatacaaaccacattttctttagccattggttgggcacctaggtaggtacattggtttcttagctctggcaaatggtgctgctgacatggatggactaatgtttgttaacttagaggttttagatgaagaaaaacatgttgaaagactcattcagtctcagaaagacaaatattgcatgttacttttatctgtggatcctggtttttatagatacaacaactcacatatgttctgtgatgaagtagaagcaaaactggggacacgaaggactaataggaggggaatggagaaaaagagagtcatggagtagtagaggagggatactcacaaagcacattatatactcccatgaaaattgccttgcatggcccttttgtttttaaagacctcttggggctggagggatggctccagttaaaaacacctcttgttcttgtagagaatcatgtgctcacgcatgcactcactcatacacacacacacacacacacacacagacacacacacacagacatacacacacagagacacacacacacacacatgcacaggagtctcacaggagcccactctcctgagtttacttggtcgttcttctgacttaacctaatgtcttatattaccagatgagaagcttgaactaggatggagttccgtggtagagtactgtttatcttgaaggatgctcaggtctgttcctcagctctgcaaagccaacaaacaagaaagaatgtggaattcaccaacaccctgaagttcacttctgaacatgggttttgtcttttgtacccaattctttctcaaggtactcactttcttcatatcatttcttctaaggtatttttattacattttaaaatatatacgtctgagagagagagtatacatgtcacatgtgcttgaaacttttgggttctttccttccactgtaacttgggtcatcaggcttcaaggcatgtgcctttaccccctgcgccatctggctggttcatcatacctatgaaaacaagggtgagaatgtttccctcaaagttctccagtgcatctaaactctatataagtcacttagagtcaacaggcacacagttccaatggatcttttagctacttctcccatcggcaaggaagttgcaaatcatttgtgtgtatttactgtgacccatgccagagataccaatacagacaggtacttaggggccacaagtctcactgcaagccttaggatagaggacaaagaaaccccaaactatccaggaatatgaaatcacaaggagaaatcagagagcagaaacattagatcatagcgggatctgagtagagtggtaaacatgcttccagaccccagtgggccatcctggaaaggcaatctgggaagagtggctctcatagcacaagcctcgtgaaacacttgtgaagagaagggtggttaaaacatctgggtcctcggggagggtaagccttgatgggctcccagtatctgtggtgagtttggaatgacagagcaatgctccagtctgatgctaagcccgcctgggcacattgtggactggtaaggaagccactgtccttggctttccccttcagaaacttgcttttattatttatttttcactctcagtttccccagactctggcttataaatcacctcattctctgacagactggtgggacaggctttgctgcattctggaagtttggcaatcccacgtttccagtctccacaacgtacaaaaggtgagtcttgcctgccgaagagtcagagcccagagtttgtcagcagcctcttgggaggtgccattctaaagtgtctggctgaccctgtcctaaatctatcagactgtgaaaataatgggcagaaagttaccattcttgagaacttcccccaaggccactcacttggaataaactgggttatctaaaaggtagtgttgactctcatgctggtagacctggaccttggaataggctcccttcttttaacaccaacccttattagctacttgcctgtcgctgtgagaaaacaccatgaccaaggcaacttatgggaagtttatttgggcttatggttccagagggacaagactccatcctgttttatccaaatagcctgtcaggaaagaaagtgatttataagccagaaactgagcgaactaagcagggaaaaataaataagtaaaagaaagcctggggcagggggagctaagagtaatttgctttctacacaggcccatggtgctctgagacaggcttagcaaacagactggctgtcatatggcccactccaacgtcactgcagaggttggtaacatatcaaggggaagtatggcagctggaggtaggcatggtggtgtaagcaggatactagagtaacctttaaccatggagcagggagagcaaaggggtagtcagtgaaacctttattctcaaagctcagttccgtacttcctccagcaagggtgcaccatcacagcctccccagactgtaccaagtattcaagtaactggggacaaagtattcagatcattatgccttctgaatcatgatgcctgatgggaaagtcttggtaaggagggacaaggcacctcacactcagctaattgggacttcaaaatgttaatcatcaccaaaccatagcaaaaggggaagaatgtgaatcagtgctctcaaacacttctagaagactttgcattttaatatctttctaaaagacattcacactctgtgagaaagacttggcatgctctttgagaaagctgggcagaaaatcaggtcacagaccttgtggtgtgactttgttaagagttgatattaatccacacaggcatgcacggcctgtagggtctgggacacattgctatcagagactgtgtctcccttgcttcttcacagatagcaaccagcaaacagtttctccagatactaatggaatctaccaagatgcactactacaggtgatgtttccaagcaaactcatgagaagtcttggtgtgcgtgtgtgtgtgtgtgtgtgtgtgtgtgtgtgtgtgtatacatgtgtgtgcatgggtgtatgtgtgtgtacatgtgtgcatgtatatgtgtgagtgtgtctgtgagtatgtatatgtgtgtcttagtgtatatatgtgtgtatgtatgcatgggtttatgtgtgtgtgcatgtgtgtatgcatgggtgtgtgtgcatgtgtgactgtgcgtgtctctgcgtgagtatgtgtgtgtttgtgagtgtgtgtgtatgtatgtctctgtgtctgtgtagaaagctaaattgttacccattggatctgacagaaaagaatgtctactgttctgccaagaggcatgcttgaaaatgtcaaagtatacatttaatttcctgggtggatactgagatggtggttggggtgggactacattccagaggaaggagcagcctgcagaggcctgaatatgaggtggagtcaagctccttcatctggtctagcatggtgtagcatggaaactgttggtgacagagctagagatgatactcacagtcacacagtcaaaatgagcaatctagaagttactcctgtttgctcatggcaatagctaactccctttctgctatccctttgccccttttccattcccctgtgaaatctttgacataaccatgacagctgcccaatgtccatggtcctttcttttagtagcagaaactcatttctcactcacatactttggggtttatatgaagtgagagcctctctctccattccccaaactagggatagacttgtgacccagaaccagccagtgtgaccatagcatttcctggccactatgttcaggaatgtatttaaaacagtctgtattaagtcctacacaatactggaagtctgactgtattaatggagaaatgactccagaaatcacaacaccattatttcactggggttgataaaagaaaagtgtgagcctagagctgttaattactttgcccttttcagcattagaagaatgagcctgagaacacacctgcattcagaacagcacaactgtgagaaggagaaagataaaccacacactcagaggagtccaatcttgctgtgtctgaagctacttcacttcttgtttgtcactagcatgaagtgataaatccactttccaactaaatacatgctactcacagatgaagtggctttgaaaccttagttccaggccaaccctggccccttaagcctctgtaccttagagcgtctgttacctggacttgacccaagaactggagacttaagaaaaatctatgtgtataaggagagcagttactcaaataggaaatatcggacttccatggctccagacacctttgactactttgatttcctgcctgaatctttcttttaatccatgtttgctgggatattttggcatccaataatagatgaagcagggtggcttcaatggtctttgtgtatctatatggtcaccttgggtctaggcatcttctttaacttgcctattctgatttccttgccctgcttaaaacaccattgtacctgttagaatatgggagattgggccctatcgggactcatgcttacatggcaccataaaagaaaaccatagctcttggccaattaaaattagccataatctggtaccatccagccactgccatactgatagggaaagtccttctgtgtatatgtttgtcttattggttgataaataaagcactcttggccaatagggaagcaagataggtggcactaggattcccaggattctgggaaatgtagtaaagagcagagttgccatgtgatcccgtgaagagagaatgcatgccactggcatcctcgataagataagtctttataaaatatatagattaatggttatggttgctaccaggacagagctagcaaatgagaaatcctagtcattggccagcagcattgtaactaatataaaactctgtgtgttgtttgggggccttagtgtggtggtgggccttggggtggctggcagaaagagttattgttacaccatataagctgagccctcattgtgaaatatcagccaggtaggactgccttcatttgcatggcaggaatttcatggtggaaatcctaacccaaatggatggccctgaaacaaaagctgcccatcgtatcaggcaggaagctcccattactgcctgtcagccttcctgtagtgtgtatgaaaaacttagccttttttttactctgctctgatgcaaggccacaatacccgcctttgcagacttctttacactgtatgatgtgttggacttcaacaacagtttactaagctggtcctgccagtccactacaatctggtttctgcctgcacctccagggtgcaaacgtagctccatccacagaaaccaccctctatgtcctgatgagcttactcccctccatcacttcacttctgctacagacccttcctttgtccagaatgtcttcctaacagatgaaaaccacctcacccagcaatgcttctcagacaatgtcagcttctttttgaacacatgaagaatgtctgggtgataggtaccaacttaccatcttgttttgactatttgtttgtctaaacaagccagtggttctcaacctgtgggttgtgaccccttggggaaggtgtcaaatgatctttttacagggatcagataacaactatcctgtacatcagatattgccattatgatttataacagtagcaaaattatagttatgaaatggcaatgaaaataattttatggttgggggtcaccactgtatgaaagggtctcagcattaggaaggttgagaaccaccaacacagggtctcatgctatagctcagactggtctagaactcactatgtagctcctgctggtctcaacatcaatgatcttcctgccccttgagtgctggggtcataggttcgagccaacatgcccatctggatatgtgttttctttttatatctttccatccctagctagatttcatccaaacctcctacacagaagtggtcctcaacagttgttaatattttcttttcattctaactaatcatttctcattgataatcctgaaattctaagtaaatttaaaaggagatcctgattccccagccctacagccccccaaagcttcacagcttgcattcagttctgtcttctactttggttttgaaattagaaacatatgttgatttgcaagacagccattttttccttgttattttcttcccccacttctggacaaacctttaaaacctcactaagtatgtcaagaagcagcaatgaaaatgtcaagaaattataatactcctttctgaaacacacacacacacacacacacacacacaaacacacattcacatacacagacacacataaacacacactcactgacacattcgtacacacatatacacaatcacacacactcacatatacacacacagcactgctggtatatttacaaagatctaagttgagaaaacaagggctaattttagatttggatttttccctcaagtcataaaaaaaaacaaaaacacaaacattaactgaaaccccagtgcacaaaacctcttagtcatagccgccaggcactttcaaaaaccaattttctagagaaaagattctgattcacagctcatgaagtcatgagttctgcccccctgatgaatagaagtgattgaaatgccaccactagggtctagttttacaagggaccatcagaagtgggagctgggcctgatctgctattttccagctcatttcctaccttgatgacatcctacaatgtgaaagggtccttctctgaccccaacaagaagacagtgatgagcagacagtgatgggagtgttgagctttcacagacagacatgacaatcttaggacatcccataatcatcacagcaatcagaaaactgtgtggtgaaattttgacctcatttgggaaattccccccaacagtgctgatatggtgtccatggctgacaccactcagactttctaaacagagttgatgatacctcaggtctcagagcagaccacagagtgggccagggaggcagtttcttcttggctctcttgctttctgtggaaggagttcctgtcctctgagatactggggtcaccttcagagtgtcttcaggatggacatctgttggctctgggcctctatcttctcttttcttcacttctttgtgaataccagtctttgtcttggggcaaggcaaacagatgactgaggagatgtctgttcctcctgtggtctttgctgtttacatcgtcactagaataagctgtttctctctttttttgaaactgtggtcactggggcttgatgatgagacatctccattatgggacaagccatgagtcaaaagcacttccaaatctcagattctttgtgagcctctcattgactttagtcctctggaaacccctcctctcagcctgtagaaatggattgattctgcctatatttgttatttactatgaacttgtttaattcccaggcttggaaaaacaggctcactgggacatcattggaaagctacaagcttaaattagaaaggagacaatgaagaagggtgcaaggctgtggatgagtaggttgtgtctgtccttggcaaggcctcctggcttttaaacaccccttcatcaaatctctctaaagcctgtttggcaatcacagcttcccagagctatccagtggaatttaaccatgatttaatctgcagaacttgcaattgcccgtcacacttgaccctcctctgccctcaaggcttatggatctctcagtgttttgggattagaattgatttggttcctaaaataactccagagtattccctaatggcatgtgtgcgcagatcaggaataaaccttcttactttcaggctgtcaccctgtttaacagtggtttatgaacccagcccagatagtctcccagtaggatttttatgataggaaaaactggggtggggggaatttcttaaggttaggtataacccctgcggtgcctaaaaacttaaaatggagatttcagtcttgttctggtaagtgattttgttttctttacatttctttctttcttttttggctaagtgtgattctggtttctcacgcacctgtatggattctgggcctaccaactacatgctatatggttttcagaaagtagctgtccatagcatcttcatctataggagcaatacattaacacgacttcttatcttgaggtgtgtgtgtgtgtgtgtgtgtgtgtgtgtgtgtgtgtgtgtgtgaaatgatttcatgtgtgtgcacacatgtatgtgtgtagaggccagagggcaatgtcaggtttcttcctcagtggctttctacaacagtttttgatacaaagactctcacagaacctggatcttgcacatgtagctagacgactggtcaacaggtcaaggaatctgcctatgtccactttgttggctctgagatttcagacatatatctacagccataccttgcttttactgggttctggggatctgaacaagtacttagctgactgactgagccattgtccttgccatcatctggagttttgaacgaggattaatgcaagtagtacatttgttacattatctagtatattttaactatgcaattccgtcttttcaaaatctgtttgtacaaaaactctttgttttacttgcagtgattaatttatacactttttagatgggactctggatagcaaacacaaacctagttcctttgctgtggtgacacagtgtctttaggttgggcaaatggtaacttcagtgagtctctagagcaaccttatttatcacagcatgttaggttttgtttggtgttttgttgtaaatattcacaagaattgagctcatccaattataggaaacatttcccagctgagagacacttaatcatgacttacaaagaggcagctccaagtaatgctgcctgcgattgaaataggcttgtttgacctgactgactacagcagcaacagggaaggggtgtgaagagaaattggggagagctgtgttgttctggccatgtggtatggattggatggggatgagaggtactcttgcttggtgtatttatgaatggacaaagcagggaaggtcagatacaggtagatacaggtccagcattgcctctacatgaaaagagaccagagtctctacagcagaacatacatgtatgcattgcatcaaatctcagacactggtatttcctctaaggagaccacctatcactgcaggggctcccagcacagagtggtgtgtgagatgggaatagggcattagggcttctgttgcatttgtgtgaatgaaatcaccaaaagtttgtgcacaaaagcagctccatatttaagctcaaattgcattttttatgtttctaggaagagcctataacaggagtcttgttttattaatgaaatgatgtttgccagcccaaggaataaattagtgatttccaaaagatggtctgggccatctgtatgctcatttattctacaagatagtaaagtgtgaggttaaaaaaaaaatcccagaaatcatttctgtgtcaggtatttggacttccttgttgacagtaacagaagacagagcatgggtgagacagtttttcgtgattgcttcctttccctgaacttgaagtgactcatcatacagacttacaaggtcagctcctgcaactagtgctcagtgtttactgaatttgtagaaagggccttgttagtcatgctctcaacttgcagccacttgtccttgcatggtttgaagaggggcgctttaatggagaatgttacagacattcttcctaccagcctggtcccagagctgcatcagccccaaataaacacttgagacttatattaattatggaattgttggctactgactagggcttcttattggctatctctgtcataattattaacccatttctatcaatctatgtattgccacgaggctttagcttacccagtaatgcccagcatggtattactcctccatcatcctacatgtcaactgactctgcctacatttctcagaatcctccttgtctcctagtcccatctatcatcctgccccattggccactttattcatcaaccaataagttccaataaggagaacttgcattttaaaggcaagaatttagattaaaaaaataacttggtcaccaacacacaaagtggaaggaggtaggactttccagttcccaagtggaaacacagcaaactaggagactaggagtgagagcacccccccccctttataagtaactgtcctgaccttcaggacatcaacctggggcaagagagtcagggatagggaatggggacaagagacacaaaacaggattctgatcaagtggcaaactttactttttcctcaggctagcttatgtagtcggcagagcaggatatggggaggggtagaataggttgtttgtgagccaggtgttagtgtaggcaggatattaggaagacacaaagaggatgtttggcaggataaagagtaagaggcccaggaagggttgcttaggtgactgagcctgtgggtggaggactgggttaagttgtttcttttcttgagcttaggttctaaggagctgctatgtaaaggttaactatgtggcctgccaagcatggcctaggatctcatgccaagccctgagatttggctcccaacaagtaactgccaaatgaccagaatgtttggtccttttcaccaaagctgcccccattttccacactctcttgatttttcagctataaaatgaacaaatcctgaagaactaacatgtaagcatagtaaatattattagcagtcagatgcttgaaatttactcagagagtaagccatatgtgtacacatgaacacatagacacatacatacatacatacatacatacatacatacacacatacacacagacaacgcttacacatatacacatgcgcgcacacacacacatacacacatatagacacacacaggcacatacctacagacacacatacagatacacacacatacagacacatacacatagacacagacacagacacagacacacagatatagacataacacatatagatacacacatgcatatacatacagacacacacacagacacatttatcagataggtactcatacatgagagtgatatatgagttaataagcttgctggcgatgaccattttcacactgctaccaagacactaatatttgataatttgttagcaaaaatcacatcaagtaacttatgaaattttattggctatttctatattattaaagctggggggcaataatgcttctaaaaataggtaacaaaggccatctttggggaaagaagaaaggcattcactatgatttctctgggccctttaggaaacatagaggtgttcctttggccatatacgtgtgaatctaaagaagggtgaggtggacatgaaggggataggcactgttcaaaaagtaatgtctgtaagtgttgccatggaagccaagagaagggcaccttggtccagctgaagcgccaacatgctgcacacagagaagcacacttgtgagagctaatggaaggagtctgagctgctggagcccattccttatgaatcatagcttaatgtacaaaaagaaaccaagaacagagacagaaaaaaaaaacacagctggcttctttaaacttaaaaatagaatacaatgagcatagctgctaaatgtcatgtctcaagctgatccttcctggattgccagactctgtgatgttggttctccattcactcgctgtttggtatgggaaatgaagtttaatcctttgtgggctctgaccccctggtggacattagggtgtaccacccagattcctctacatgaccaaaccactctgactactgttgagggtgcttctggctgagacagccaacatccatttgggcgtcccctatgctcagtggagccatctggcccaaagatacaagtctttccagggcttttcacatccaatgactggtccaagaggaaatataaaggttgagcatcctggttaaaagatagaagaaccaacattctggagcaaaactgactcgtctcccagcttcagtatccctcttggggcagccagatcctccaaagagactaaacccaagtcaacctctccctctgccctgtccattctggtcttctcttccacaagctttgatcccaataccaatggttatgaaagaccttttacatgcctgctgtctatttaggttgctgtaacaaagcacatgaggccagacagcttataaactacagacatttgtttctcaccattctgaccaacaggcttagagacttggcatttgtgttttaaagctggccatgttctagcaatatcctcatgcagtagaagcagcaaggcagcccactcatgagtgttccacctttacatctaatcacctcccaaggttcccattcccgatctgccacaatgattattagggcgtggcacacaaatactggacagacacaaacattcagacacagcatgcctcctccatcctgaccctgtttcccaggaacttctgactcctcttctgtgttgtcaggggaacattaactaaaggaaggccttggtgatgctcatctgcccaccctgaccctggccctgggtttacataagcataccccactgattcatggaaggttccatctcatcagagaatttgggcttcaatgtgattgttttcttcaaattgtatgaatgagtccattagtcatggagaaatttttttcctagagagtgatatgtcccagaaattttatgctggcactccaaataccacatatattctccagaaatatttgttagaccccccactgaattaagaatgacagggtttgtttttgtaagggcacagaaaatatagttataattgattgctttattgatttattcgttcatcatttcagtcactcattcattcaacaaataaaatttgggtgtctattaacagaataggcactgggaaccaagaacatggtctctttagttaacattgcagacaaggggaaacagaaaataaatacaaacacaagagagtgtcaattaatgatcaatgccgtaagataatgaaagaaagtaatgtgatagaaaatgattgcatacaagaatgttgtgaagggagggaccatatggacatccaaaatgaaaatctaggacatagtggaatgaagacctgcatgtgggcagtaggaagcgcaaggcctaaagtggaaacaaactcacagagggaaaaaggaaaaaaaaagccaaatactctgtgtgcctgaagtatagtaagaatgtgggcaaaagatgaggtcagcgaaggggacccagtaaacttctggtaaagattttatttttattttaaaatatgatgtgtttttgtaatgcatgcatagatgtgtgtgcacatgagtatagtgtcctcaggggccagaagaggtcaccagaactcctggagcaggtgttacagtgctgtgtgctgtgaaatgaactccaggatacgatcttaatttccgatccacctccacaggcctgcagtggacatgtcagagtacggcaagtctggcaagaaactggactttagttgaaagactttaggtaagcccccaaacgtcatcagcagaggaacatctccattccacacatttcaaaaagatagcatccttgaaaaatgcatggtaaagaggctagcatttatctcagcaatcagccagggttaagaaagggggtgcttgaaccgtggtggggactggaaagatgtgggtggcttgggatgataacagggatcctgaagagggggcaaggtagtggtttggatggatgtgatacttgaaagggttaaaagaaaaccagagttattccccaaggtttccatcctgtgcctgctgttgggtgggttcaggtgctatttcctgagagagtgaggccctgtttgagaattcctataaatgatggatgtgttttgccttgagcagtcactggctcttcctgacagcaggactgtcagagacacgcctgcagttttctgtcttctatgagcctcacctgctagccctggggtattgtgtatactggggagagcctttctgtgttcttgcaacatccctcctgaaatttgccatgcttggctgtttcaggacactctattataaatgagtagctaaaggcaaagcgtaattagggacaaaggcagcgaggcatgcaaagctggcatcaccgtgaggtctgtatccccagctaggtgccaattctgcactgcactgttacattgccacaggggcaccgccttctgaacatgcacccggatggttggagtggtctggaggagggggtacaggtcatagttactccaccatgaggctgcttttcaggcattggtagagaaacaaattaactggcataaccaggttcatgcatttcttctaaggacagcagaaagcacatggatgactaagagtgacgttcagagccctctgtatttattaacataaaggcattttatcaaatgggattctctatctttactgtggaaaatttctgatggttttcatggatgctatagcgctgcttagaaggctttgtgtttgggccacagtgactgagtctctccatctccttgggttttcatcccacagtgggacgttcatgcaaaaatgaaggaaggagaaagaagagacgctgacggttgcctgaagtcttcaatgaaaagcagcaaaggctggatctccacaccttcccccatgcagcaagcctttcctgccggggtaggagatgtggagaggttgaagccagggacagcacgcagaggggggcacagagtcatggaggctagtcaaaaagagaagccatggggagcagtggaacccctactgggccctgtgtgagtggggatcaagcttttatgtgacacaggcttgaaaacttgaggcttttgtttttcagttaaagtctcactggccctagtgtgcagttcaaagacagccatgagatgtctgagttttcggctgcagagaactgcctcaaagagaaccatgccacttcccagtgcagctcaatgctgcaaaagattggtcatctctgctcattttgagggctgttggatgggggatttgacttaagctttgactggagattcacagcatatcatggcccttctatactaatgggagtcaggcaatgtggagttctagttaaaaatatacttcccagggggatctgtgagctcagcgacatacccagtaaataactcctcagttttagagtgggtaactgaaatcatcgtacttatatccttggcttatagtataaggtatatatatcttatactatataagtataagtataagattatatatatatacatatatatatatacatatatatatatatatccctctgaaaccacccccaagttagtaagttcaatcagcatcccatctcctgggacatgccaagggccactaccactcataaggacctacaggtcactgaggcagtggcagtgattaggttacagagcaatttactcctgtatagaccaggtagatcctggagaagaaatgatttccttggtatatccaactcactaggggcacaagtagtaactcaaactttagctgtgattgcagatgtatgctgtagccagagagtatagctaaaactttttagccataatgtgctaacagggatctgagaggtgtgttgttttccattccaattagaatggagtatcagaatgactgagtttgtgtagagacgaccacactatgtgattggagtctgcatggttttctcacacggtagtgatcactctcctgctataacatattcattaggcagatgtatggcctgactgtccatgtaggacgattggtggaatggtctaatactgctcacacagaacaacatggcacctgatttgctcagggacttgtaaggtgtgagctgtagagaagataagccttatgaagattcagaaaaactgtcactttgtaattttggggggtttggggtcagacccactgaagtactagatccctggtttgaaaggcccagcttcatgagtaagccctctgcaaaactcctgatacaaccctacagctctgggatagtattttggcctggggaaaattgcactggagacttcaagaagggccagtagtggtatggccacacattctggccctcagagctgtgagtagcaccagtaacagggtgtgtgggatggctgatcccatgaattcttccatgccagagcagccttgcccaggactgaattttcctggaacccttaagaccacggctcagatttcctctggggagtaaagaaagctggaggactacccaccagcctcagttcctcactggctgctcagagttgcttctgaggccggggctctgtcccgtctacttttaagcaggtcaaatttctatggctgtaggcatactagccaagagacttgggaaactaaccatatgcctaggtggtctgcctgtgaacatcagtgaaggctgcaagggtatgctcagggattcaaaggtgccttttataccctcacaaaatcttgaaatcataataaatttttatctgagagagatgtgcagggaaaaaataagtgtctttcaactcctctggcctcttcctgttctcccacttcctggtgagtaagaggcctaattggttgaatgtgcaatttgatttaatcccagtctgactcagcaatgtccacagtattttcaaataccatgcacccttgtcagataacagcagtctctccctggcatcccaggcatccctgtaatggcagaaaacagcagacctccaatgcccagggcctctccctctcttcaccccctctgctggcatgtgaggctggggtggcttcagatgtctttctggcccaccccagggctgtctcaaggttgtttggctctttctgtggcccttgcagttgaaagattggctgggactgccactagccctctcaccatggcaacttttagtcaaagctcgaagaaatttttatctgcatctcctgttctcggtcaaaccattatcttgcctaaacttcattcccttcccactctcccagggaccaaaggaatctttgggtgcaggtatggcatttaactcatcactgtaccctgtcatctagtacagtctaacatgcaggccatggaaaactaattaacaaatggaacattaggagggtagacttccaagtcatctttgaagagctcacccatcctgtacaaaggactactccataggaaaaatgtcttcctagaatataaaagccgtctttgtgatgggtcccttgcctcccctctcctgacctcatgctgtgtatgactatacctgacagggacagaggtgtctctctaaagcagtcatgcctgtcctagaagactccttaactgtgttaaccatgttagtgctttgctttctgctggccaatgagctgcagagagagccaagagtactgggagaggagaacttggataccatagcaacaggatccatcagatcttagcctggtaccagtgcctcttcacctgtaatgtgggatggccacccacacctgccatcgggcttgtgtagttttgaagactaagtatacataatagcttagtcatgctggaaatttaaatagccaaattgaagacctgaattaagaacaggtgtggccttgtggctgacaggctggctgtataggcctaggaggctctgaaaaagtgctgagttcttcctcctggttctccactgcctgacacactgcacagagatcagtgtttgaatgctccaggagcattgccttcaaaagtctccgatctggcttggaagcccttttattatcagtgtagttggcatggttaccaacagctcatcttcatgaccaaccttgatactctggtgtgtgtgtgtgtgtgtgtgtgtgtgtgtgtgtgtgtgtgnnnnnnnnnnnnnnnnnnnnnnnnnnnnnnnnnnnnnnnnnnnnnnnnnnnnnnnnnnnnnnnnnnnnnnnnnnnnnnnnnnnnnnnnnnnnnnnnnnnnnnnnnnnnnnnnnnnnnnnnnnnnnnnnnnnnnnnnnnnnnnnnnnnnnnnnnnnnnnnnnnnnnnnnnnnnnnnnnnnnnnnnnnnnnnnnnnnnnnnnnnnnnnnnnnnnnnnnnnnnnnnnnnnnnnngagagagagagagagagagagagagagagagagagagagagagagagagagagagacagcagacagacagggtcccctgtagcccactgtagctcaggctggcctcaagctctctttatacatgaggataactctgaacttctgatcttcctacctctacctcctaagtgctgatattaccagtgtgcaccaagcccagtttacacagtgctggaaatggaatccaaggcaagcactctccctagcacagccacagacatcacagaggggaaagtcatgcagcagaactggagtcagggttcagggagcctgaacttggatctccatggtatcactttagttctagtgtcttcatttataaaatgttgaaaataaaaactacttcctcatgaggttgtgaattttccaggtaatgaaggtgaaaagttatttgtaaaatgtgaaagcttccctttcttatatgatagtctgtgatacattgtgtgtccagtaatgttctgtaagaatctgtggacattttcactatttataaaacatgaccatttggggagatgaaagaggaaagcaatgggataaatctgtagctggttaaccccaaatgtggtggctcactcttttaatcccagcacttgggaagctgagacaggaggattgcccaagcttttgaggctagctttgtctaaataggctgaaatccaagccagcctagtggggaatggggagagagagagagagagagagagagagagagagagagagagagagagagagagagagagagtaaaagctcagcaaatgtcctcaaagtataaatgggctgttttgaagcctataagagaataaaatggggctaaaagacatctgcttaactttatctgaaatctgtgcaaagtggagagattaagtaaacaagaatgacatgtttcttactggcataacatggtatttattgttgatacaataacatagtaaatttattctggtttgtctaaaagagaacatcttatcttctgtttagatgggcaagaatcagggtctgattttcagtgtctggctgatttgtccttgaggtttcccgaacaaatgctcccttactgaacacctggcagggtcccttgctaggaccaaagggtagcatgagaggctgaatcagagcgaactcagctcccaagtcagttcagacactgacaattaggcttgggggcagatgctggcctaccttctgaagacagacagccctcctaattctgttgttcattttattcttgcaatcttcttttgactctctggcccttccttgtttgatttaacattgtggtctccaaagctgggacatagaaaatgtcaggcttcaaattttagaaaaagtgggccttcggggaatgaaggaattgtgatatatatgggggacgtgccgttcacatgtacctgtgggtggttgctctttccatgcttggctttcaaagtctgtcttagccagagtagagatggttaattaagtaactgagcccactcatgtccaaagactgttttctcctcacttggatgggctcctgttcacactcctgaggtggaacttggggctctatagcctaggggaatcatggaaatgcataaagtatgagatacactgtccctcagtacatgttctctcctccatctaggaattgataccataccaccaaaagcacacataactgccttctattgaagtttgattctagctcagctaaggagctgtgctacattttacagagtccctatacccaggaacaaccatgtaatagggtgtgagtagaagccagtgcagacttggaacaggagagaaacatgcattctttggccatcgcttccttctgcaggaagacctaggcaaaaaggaatggaagagcagtggagagaaagggactttcagaagtgtctccttcaactacaccaaggttccttttcctctttttaagccattgacattttaacagaaagaagaacccagttccattgtgcttatgcaaaagccaatggagagcccagggcatcccccagaggcacatacactttgctggggggaagtcacaggagcagaagagagcaagctgtctctaccaaaggagagaagatacaaaagggaccatcatggccagggctgcaccacctgccttctcttgcacaattggtgaggtgtggtgaggactggtaaatgtcacttgggcatccttttatatgagccttttatgggtgtctttctctagagaagtcactgtaattgatctgtagtggtggcatctcaggcagcctcactttgcatgcgggttacagagaatgttgtctacacagctagccacagagctgaattcattctcgcttccctcttagaatgcaatagcatttccctgttcttgcaaaaggaaagaaagcagaaggttccaacactcataattagacatcaaacctgagtcttgttgctggcagggcacaggaaaagcacaaaagctcaagaaaatgtaacatttttacaggaaaatgtttctcactgttagcccttccccccatttgccttcactgcattgactagttaccacaatacattggctgctggttaaatctttgtgttgacagtgttctgagggttagcccagagcaatctgagagcagccccatcagcctttcacgaagatttgtttttccagtacaaacaacctcaaatgctcagcatcatagccctgttctccacccaagttatcaaatgcaagctcaaatctagagggaatggtagggttcaaagttttttcctctcttcccagtttatctctagatttggagtcagcagactaaaataaggtcccttactgactgctattttttttgcactgagtttaaaaaaaaaaaacaaaaaaatttcttttatattgaaaacttacatctcacagtaaattccagggacagcaaagggaagccccttcactctttaccattgttctcctcagctgtattttacataaatatattatatgtcagagctagagagctgctgttactgctactggtgtgtgtgggggggggagggaggttgtgtttaaacagatagttgtgtgtgatgaatttgtgtagcacatgcataagtgtagtttatttacatactacattcgtatagtttgtgtgcatgtgtgtgtatagtatgtattgagtatagattgtgtaaggtacttgcccgtgtatgtacatgtatagttgtgttatataatttgtcttttgtataaaagtggattatatgtggtgtgtgtgtatgtggtttgtattgagtataagttgtgtgtaatatatgtgtgtatatggtttatatgggtaatagattgtggtgtttgtgagtagtttgtattgactatagattgtgttatgtgtataaatggtttttatacagtttatattgaatacagtttgtggtgtgtaaagtttgtagtaagtataattttgtatggtgtgtagatagtttatatacatgttttatatattagtgtatgtagtttgtattgaatatagattaagtggtttgtattgagtgtaaattgtgtgtagtatatgtatagatagtttatatggataacagattgtggtgttttgagtagtttgtactgagtacagttttgtggtatgtatatatggtttttatacagtttgtattgaatatagattgtgtgtgtggaaaggtggttagtcctgtcattttttcacatatacaatcatatcatcactctgcagatcaagatataggtgtgtcacccccaaagcttttagggacccttgttaaagctatgcccattcacctcttttcaccatccctaaactcagacagtcacaaatgtaatctctttaagaatgctgtataaatggtagtacatgcctcagcaccatggaggatgaggcaggaggatgaggccaggctgggctacagaaagagtgcgaggccatctggagacataggaagaccttatctcaaaaacaaacaccaaggactggtaagattgctcagttgattaaggtgactgccaccatgcttcaactgcacgttgtcccaggacctccatgtgagtccagtggcttgcatgagcccatacatgtacatgtgtgtacacacccaacataagcaaatgtataaatgcaataaaaatcattaaaatggtgttgtatgaatgagatggctgaccatgtgcaaactacagttactgctgtgccaaggcttgagttggtaactttatttttattttcattttcctctgtttctcactcttctgggccttttttcctaacttcccatcaggcacttgacagacttcaggattccactttgactgacctactgcaactttctgatgtatttatatacctggctcatcaaaatctacaaatgggaacattttaccagtctgaataaattacagaaatcttacttgtttctaaatccctttctcctaactcacatatattgcaggtgctatggatattttctttgcatacattgacaaccatattggacactatgataaagtttagcaaacttgagaggaagaaatatctcgaacttgtacttttagatttttttccttcttcaaaatatttgagcagtctttaaaaaaaaaaaactttgcctttctttttcaataactccctttaatttaaatttagccatttactcagaaaggtctgttgtaacatattcccttcaatttcctttatctgggaaatatctgtttcatcttcatttttgaaacacaatttcactatgtataaatgaccaacactcctatcactgaaaacatctcatgtgacactgtccattgggaaatatgcacaaatgtgtattaaccacagagagggaaccaatggcaaagcaaagctaacttggtgaaccaatgagctttgtcagggttacttacaggagtataggtgagaggtcatttactggagcagaaatgactcaaagagagctgatcaccaaaagctcaggcaagcatgggtgacaggtcaccaaagctgggactctggaactcactatacaacttgtttacaggcaattcaacaggcagaagaattttcttccaggcagctctgttgacctttgtaatgtttcaggcagtctgtgtggcttctggctcttccagatgcttgtctaccctctgcctcttgtaggtatctcagctgatccttcacaggtctctttctttttcaagctatttggctagtttctgactcttctagacagctcagctaggcaggaagtatctctccccagcccttgctgtgtataaacactcaggaagggagggacctggtatatctggtcagtttcagggacttcctgaggcttctgagttggcttacttcctaaatcttaacagtatttccctgcaggatataatatatggaggaaatcgttacacaacttcattcctgtggtttctcatgaggatgcagtagcagacgatagaatgtgagcagcaagcaggtgaaccaaggagtatgtctagaacagatttttaaaattaggaggtgattatacaggccataaatagcaagagaggggaggtgggaggtgaactgtggagaagaagaggcaagctgaaaaaactatttagaagtgacagagagtaatggctgtttagaaatgacatcattgaaactcatgggatgtggagttggagaaccaatttaaaggcctgatactgtttacttgacacactgccttttgccaaagaggcttcccatctgagtctgtttccaaaatgagcaaatgattttttcgctttcctgggacttgactcttacagtttgtcacagaaagccatgtcatgggattgaggctgtctatctgctgttattatttttaattatgtatgtgtatgggaacatgcttgcagacgtgtgtgtgtgtgtggggggggagttaggtagtgctgagccacccaatgtgggtgctaggaaatgaacttgcatcctctgcaaaagtagcactcactattaactgctgagccatttctccagcccctgtctgtttattttaagtcaatttcccaatgtgcctctccaaaaagtagcatctctttgtctaactcatgtggaacttatctaacaggtggtggagtcagggctaaatgttgtgagactataaaaagatttctgtaactcttctgtgtttaagcatagataggctgaatataagtttttgttccagctagcctctgattgacagctaaagcttgccattaaattaatgctcataaatagtagacccatataaatagaatcatgcatttccctctttggcacctcttaaaaagatcaagaagatgtttgcaattccttcaaattttactaaacatgtgtacattgtgtctcagattctcttgtatagtatcactgagcaccatcacttcatgcaaatgacactgtgtactatcacttgcaaaccaggtgcagagctacaggagcaaacttccacttaacttcacatccagatgctaagttggtgctatgttttatgtctcttctctccctttaattccgtaataacaaaaattgccacaacccacttctcacttaacagacactgagctttaaaaagtgacagccattttggtgtctatgtcagaattaagtgactacagtgagagccacatggtgactgctgttctgaatgccatcttcactacttttccattaactgggacatcactgtaagttgtacaaacagcacagattcgtagtcacacctcgggagcattctggaatgccccgtatctccatccagtttcttccatgagtttgcttactcttccacttactaattcagcaatgaaaatggattagtcaccactttcgtcattatttctgttaggccacaggcatggcagctacatgtttatctattgacattacttgttttgggcagctgctgtatcttccctcctggcagcgggagacccatgagctcaaggagcttacagtgactactgaccatcacaaacaccgacattttcaaggatcttccctgcatagaatcacagcatttcccctgaaacaggaccaacaaaatgcatttaagatgggtaagttaaaatttcccctcttgaaaactggtttttaagaacatttttcaaatcacccgatgagcaaataaggagcttaattcattttcctgtctttcctggacataatgaatctgccactgccacggtcccaagccctctccatctgaagaaacaaagcaggcagcgagaaacaggttgcttttgtctgggtgatgtcatccaggtccagtgagcgatctgctgtctgccagttctggttctctctgcactaagatgctgccttggttttctctctccacagggatgcagcagggctgggagggagatgggggagggtggctgccctcccactgacagttctaagagcacatgacagaagaaaaccaggctattactaaaactgatcagctcagaagcaatgcaatcaaagccttcaattacacctgggtgatttaatcagctccctgtcaaactcgggctggggctcctttgctactgtacaaatacagtaattaccacaccagcttgcaataagatatcatttcagtggattagaaaacacattctgtcctcaattaccaacagccaatttatagaccctgaaacaagcaatattttttaattgctgcctttgtgtcattatctcaaaattacttctcttatgaggcattgaatcatctcagcagtgttgggagtgagggcaggggggagatccaaaaccttgtgctctgttctttcagatgaaatagaagcatcaaccttgttccctgctgtgctagattttgaaataagaaaacaatcagaactccagagactctcagctatgcaaatgatcataaacaaagcccaggggtccagagcgaatggctgatgaggaaaccaggggtcacattattctgacctgtgactttctgttcttctagccagattccccatcatatccctatcttctaagcttcctcttgtggaggaaggcctttatttcctttgagggtgtgctttagtttgtgccagatatggccactgtcatattccaatgtttggaagatttgaaatctctacccattgccttccaagcccaggtacccttccaaagagcaggagtgacttagctccactcagccatagcagggcacctagattcttcacttcctggtttcggggcacatcagatactccctgctgacttcctccaccctgccaggctactcagcttagagggatggtagagctagcttccacaggaagtacttttattttaccagacagcagagtacagaaaaaattattattgttagtatgacaaaccttccacagaatttacaacatcagattgtatttcacaaatactgtggcagtcagccatagtgtgtatcattgatctcacttactaagtgaggaactcaggcatagaatgactgaaggttctggaggtactgatgtcataggacattgaacaagactcaaagagaataggttttgatcctgacactggcactcagtagctaattagcatctttagtagcaatatttattgagagtgccatgaactttttcaacatttcacactagtgctacttttaatctacataatgactccattaggtaaaaactatagtaaccccaccgaataaagcataaagctgaaatggagaggagcaacttgtccagggtgacattgcaaggaaacagcacttctatgctcctgttcttagctaaccattgcctttgatttgggcacttctctcaggctatgacaaaatgcctgggagaagaaatggtttgacaatctagtcatggtggtgaaaccctgggtaagttcatggcagtggaagggtggggctagggcttctcacatcttgatgacaagaaagcaagaatgtggaattgatgtagcatctcctttttccatttttattcggtctgagactctagcccatggatggtcctacccacatccagggtggaccttccatcctcagttaaatgtctttgtaagtacctagacagatgattcgacatggtgagtccaatctagtcaagttgaaaactgagatgagccttaacgagccataacgagctttctccactctgtgctgcctctagttgtgttctcctgaatccctaatttcaagttatgttccactacttggacgatgtcctagaggtctcagaaactgtctcccatcttcaggacaccattatcttgacccaaacctatatatccttcaatatttctaatattctggaatgtatacctttaactgcttggttatctaagccaacatcccaggcataatcctgggtcaccatctctaacgtggagaattgccatggtcttctgatagaatgactgatgccagtcggatcatttttagaaacacacaattatctcaccaacaactccctgctcctgccttatcagtgaccatcattttatgtcttgggaggctctcaataatcttcatgataaactttgtttatagtaataatgctgccttctcttgtctttgtattgcccttcttggttttgtgccataccctactcccaccactggcagctgcattcttctctacaggctttgttgccttccttccagaggcatacagaggaagaactgtgataaactaactgagcattgcctcagttcctgttctgacttcagcactattcagccagggcttgaaagcatcagggagttcaagcattagagtctgactgaatgtgccataaacctggaaaggataatattgcttcatttggtcaaatcccccagtgttcaaagaagggaaggacacaaaaactgtatgaataaacacacggttgctcagtagtggtggcacacacctttaatgccagcacttgggaggcagaggcaggtagatctctatgagttcgaaactaggttggtctacagagctagttccagaacagtcaatgctgttccacagtgaaaccctgtctcgaaaaaccaaaccaaaccaaacaaaccaaacaacaacaaaacagcaggggtgagtgtggagctaagtcttttactctgtggggtttagagttcagtgttctgcttcaaggacaaatcttccccaggttaaggcatacatctgaatgcttttgttccatggagaaaatcatttcccatctggagtgcctcataggtcttaattggttatatagataatccagttgtcctcttccactgaacatctgtatgttgaaattgtgcaatatcaaataattttaacagagtcctttctcaaaggtacacttgtagataggtgacttaggtttgaagcttgacactggaggagtctgacaaaaatgaagttaagtggaccaggatgatccagataccaatgccaattcaaacgctcagtagctgctacaagtctattgggcaacataatttaaataattaagcctattaagttaattagtcaaacatttttaaaaattcaccatttgtttatacttccacatgctctcttgcttatttttcattcagaaagtgtcatgccagagagagagagagacagagggagagggagagggagagggagagagacagagaagagggagagggagagggagagagagagagagagagagaaagaggaaaaaagaaaaagaaaggaatctgcttgccccatatgtcagcactgtggcatgctgggaatatttagacagggtagatattaaattgtctcagcatggtcccccacaatcacaatcatatgaatctaggtccatatttcgggattatttacattaaaaatagtaccttgcttgttcagtcccaattcctagaatttaatctgtttgctggctgtatagacagccttgttcattccccattttcatgccaaaccaggttgttggctggaggaaaccacaccactccttcccctgggataatggactcagatttgccaccgtggcttctagccagttctgtgaaggttgcccttgagagtatgcctccctggagagaaagaacaaaagagtgaaaacaattagcactagatggactcaaaacttacccaatctttggagcctggcatacttgatttttgggggttcacaaagttttaccagattaaaacaaggaatgtcctgcagagtgtcccttctctagctgagaaaaccctcacagcagcgtcgtctaaaggtgatcgagtgggccagagaggcagcagcaccccagcccagaatcatcccagccttgtacatcagcagagcatgagcagggaaagttactggttttactttgttctttacccagagacaaagaacttataagcactctttggaagcttgttgagagataatttgctccaatttctccccctgtggatgggccatttcctctctcagtcataaagcgggaagaaagaacagattaatcagcccactcattctaaccttccacagtttcagagactgttgtttcaaagaaattttcctcaggctgtcacttttctgtcatttgaatgttaaccccttcatgacccacatcctgcgcttaggccaggctttgctcttcatcagtcaatggaaagcaacaggaccttctcccattcaggagccaggtggaaaagacccctggagcaaaggactgctgagtctttcagattgggcctggtcagtcactagaacagcggttctcaaccttcctaatgctacgaccctttagtgtagttccacatactccttctccctttgcttaattaatatatcattctccaggtctcagctgagccattgttttgttctcaaaatttgtggttagtgaacccccaaccataaaattattttcattgctacttcataactataattttgctattgttatgaatatctgattgtaaatagctgatatgcaggatatctgctatgcgacacactcctctgcaccctctcaagggatcaaggcccataggctgagaaaccactgcactacaggaagactgacgttacagagattgtacacacacacacacacacacacacacacacacacacacacacctgagctatctccccaatccagcttttcctcttgccttttaaataaacactttatgcatgtctgccatatgccaagcaccaaagataaaactataaacaaaagaatctttgccctcaagaatctcctaggaaaggagaaacgggttctggcttggagtggggattgggagaaattttgagaacaaaacaatggttcagctgagatctgatctgctaattcagcaaaaggagaaagggtttctagaagaggccactaactgtgcaaagaccctgtgggtgggtggacacagagtacccatcactgacccagaagcatggaggaactgtgggatggtccaagataaggctgtagaggctagacaagaactcaggccactcctgaaggtttcagtctttatattataattaaatgtaatagaaatagtatgtgttttgcctgataggaaaccactgaactattcaaactaaaatgtacattaaggcagtatgatctctaacttaccagccgacagaatgaactgtacattgtttactgttggttaaaatcctctgcccccatttccacccctaaccaccatctcgttcatgttccaattgccctgttgtggtgaatctgcacggtcagtttggctggacttagaataatggcggaaatatgcttctggctgtatctatgagtgtgtttccagaaaggtttagttgaagagaaaccttccctgaatatgggtgatgccatcctcttggcaggatctcaacagaatggaaggtctcagtgccaggttcatctctcctgtctcctggtgtggagtccatatgactggcttcctcatgcttctgttgccatgccttcctgccacaatggacggcacccttatggttatccagaataaaccttcctttcctcagttgctttttgtaggcattttgtcatgacaacaagaacagtagccaatatgccctaggtacagtagattccatcttctccatgttgctctctcaccttgcctcatgctgcctgggactccatatatttgattctatcagtccttcagtctgaaatgaacatgctgcatgctctgtgaaactggagtactgtccatccagacatgccctgtacagagccagagccatagttgatttttaataaacatgaatgagtgaatggatggatgttttacaattttgaatgtgatcccacccactccaggcactcattcctggttctccaagttggaacagtgttaggagccagtgcgtatgtaaggagccattggaagctgtgcgcatgcgcaatgggtaactttgtaactttcctgcccttagtctccacccctcccgtgacgtcatatggttcgatcagctgatgtcacatgttccgagggtttcagccggtcagaatgtaacacttctgaggcgacggttgccagcctatataaggaggggtttttgggcgttcagggtctccattttgtaagcttatccttttcctctcaagaggcattaaagctttactgcagaaggatcctgaggagtgtccccgtgtcgtttttgctggcgaggcggttagcgcgggacagaacaggttgatctttccttgctactatcctgggcgacgccttattctggttataacattggaattttccagtcccatctttaagaaaaggtgcaggaacacatacccagtatacccaactcaagtcaaggcttagaaggagccctttgccacctgccctgctgcctctactgcgtggcatcagtctttcttctctgctcctgctccctctggctctcaataagtgcatgccatgcagcaggaaggaggccttccttgagagcattgatgctgcactgggcttctccctctatttgctcccaagctgccaatcactgggatattgcagcctttctgtagctaccctacccacacatgtctaaaggcagtggtggcactgaaacgtggcatctgccatcattaacactgtgtcacactttgtaatcagctctgtaatatctatgcttggagtcaattgtgtcaagaaatgtctcctcaacagttgactctgttttttgattgctccttgcatgataccccaaactactcaaatcaaaccagagcaagaccctctccagcagcagcgctgaccaaattggctgagtgaaggtctgtcatctagcatagtttctgcaagctgctttgaaacagagcaatgtgagctaagaagagaaggctctgtgtggttctatccctggcaggcacatctgtgaccaaatcattatcagagcctaacagtagagtgatgacatacgcttttaagctatgactggtgcccacccacctgtgtccaggcaaggagcctcttccacactgttaagagttggagggattgcccagagtcttgctctatcatataggcatggggaaataggaactatgcaagcttcctgtcttcgctaagtaaatgtctatacccagcctggatctgtaacttgtttttctcaggtcaccctggatggcactaatcaaagttcccatcaaccaaaatagtgttaatttttagttctagttggagaggtttcactgctccaaaagtttccccaggcttgatgtgcctgtgctaggcatttatttcttaatgaagagacacatatgtggacacatgtgcacacacctaatatggaacgaaaatagacaaggctattgccttcttactctttcatgttctcccctgccatccatcacacactcacagggccagatagatctcttttagcacacctctaaacaagtggatacccgggggggacttgaattggggtgggagtggtgctcgtcagttcagacccacaccaaaggctatatgcattaatgtcttgtgtgtgtgtgtgtgtgtgtgtgtgtacagatattagctgaatcgagcattgtggtgaggtgacagctagaataactaagcatcttgtagatgtagatcagtatgaggatcttttggagccttggaagacacattccacagcaggagtccagatcgtgtcctggcagtgggcagatggtcagtcaacatcttttcctttgctttttcctttcttaactatttttatttcaagaatttgggattttttttccctatcagatttcttttcccttggggaaaatctgatagtaattcacagcttggtacaaacctacactgcccatgctctccttcttgacctaaaatttgcattcaatagcaaattaaaaattagagtgcattgtgttgtgttcgcaggattctaggaatcgggatgaaatgaaagggaagtgaagacttttcctccatagtctgcacccaggcacagacccgggcacccatgtgatggctatgtgttctatgtgagtatccacatgggaacaggccctgacagtagtgtgcaagagaattcaggctagcagcacgtggtgtccatcttccttctgaagctattaaaagcctggccatagcccttctcatcatggaaagaaatctagcggagcccttgccacctacccagtgccaagtggaaagaagcacaattcggagttattttattaatagttgggaagccaagataaggagtgatcacattacccctggctacaacatatttgaagagggggccttcctcccatcagctcaagcctggagttgttctcagagaaccttcatatcctctgaaagatatttggaaaaatttaaaagaaaaatcactatgctatccaccttctctggcatgcacctatgagaataaactggtctctctctctctctctctctctctctctctctctctctctctctgtgtgtgtgtgtgtgtgtgtgtgtgtgcggtgtatatgaatgtcaaggaactgatgctgttgaggttaaagagcaacttgcaaaatttgtttctcttttattcccttagtcccagggatcaaactcaggttaccaggcttggtggcaaatgcctttactggctgacctatctcaccagatgttcacaaggtctctcattggacctggaatgcactgatttggctaggctgcctggctaatgagctactgggatctgcctgtgtcctccctccccctgctccttagcacttacactagtaagcttatactagtaagtctggttttatctgggtgccagtgacacaaacttgggccctcatgcttgtgcagcaaacagtttactcactgatctgtcttcacgaccctgtcctatgttttatgcaagaaaatacctcattcactgtggctgttatgtgaaagtgtggcccccagtgggcacacatcatgatgaggccatcaaaaggagtagaaaagaaaacattagaaggtaaagaaccaggcaataacttgtccaccagaaataacaaagccttgagaggagtaagagggcagtgatgggatggggaacctgtgtccactttggagggaacttaaagactttttagctagtaagcaaatgaaagatgttccagttgctttacagctgttgctcagctttcacagacctcgggaagcccatgcatgctcttagctcagaatcaggtcgagttaattcttgagaactacactataaagtgtaacattctcagctcggggtgaacctgtagagagtgctggtctttctttgggcatgaacaagggaagccaggtagctacatctaagtttcctgagtcagagctgaggtgaaggcaggctcacctatcgttctgtgtttgctaccctcagtttgcaatacaagggactctgaaagttgttacaacagggttcacagatcgtcttggaaggtgaatgcgatttaaaagcaaatagctaatttcagacactagaaactggtgagacatcccatgttcatagattggtagaattcatattgaaaaaaaatgaacattctaccaaacgctatttacacattcaatgcaatcccaaccaaaattcctatctcactcttctcaaaaatagaaagaaaactatcctaaaatttgtatgttaccacaaaaactgagatagccaaagcaatcttgagtaaaaagaacaacactggagggatttcaactctggaacaatattgaagatccaagcaagcatgagtacatgtaactacagttatctatattcaacaaagatacaaaaaacataagctggagaaaagacatcttcaacaaatggtgctgggaaaactggatgtccacatgcagaagagtaaaattagatccacatctatcactttgcacaaaagctaactccaaatggatcaaaggcctaaaccttaaacccgaagcactgaatgtgccagaagaaaacataggcattaccccacatggtataggtgtaggaaaggacttcctggtaggactccatttgcccaggagttaaggccaacaattggcaagtgggacttcacaagactaaaaagcttctgcacagctaaagaaatcatcaactgagtgaagaggaagtacagagaccaggagagaatcttcaccttctatacatctcacacaatcaatgtccacaataataaagaactcaaaaatcaaatgacccattcaaaaagtgggcttgaggctttaatggggagttctcaaaaagaagaaataaaaatggccaagaaatatctcaaaaaaaaatatgtcaccatcatctctagcaattagggaaatgtaaatgcaaacagcattgagagttcaccttaccctgttaggatggtaaagagcaaccaaacagcaaacctggagaggatctagggaaagggagtcccatttgctgttggtggggatgtaaccacacagccattgtggaaaccagtgtggagaattctcacaaagctgaaactagatctatcatatgacccaactatactactttgtgtattttctcttatctatgggtcccggctccaagtctttaggtagaagtatagttctcatccctcaacaaagaactttctcattgcaacagacagaccatgttacgataaatctttccgccaaaagccgcctgagccccaccaccacgtgtgagctttatgccagccgcccgccggagttaggcccaaatgaatacccagaaacttgtattaggtacaaagctgcttggccaatgactaggattctcatctgttagttcagtctcaattatcatacatctatgtattttataagacttatcttatcgggcgccttattggcgtccctccttgctggtggatcacattgtgctgctggagcagttgtggaggggaaaagagggctcttcctatttctccttcgcttaaatatgagtctccttgctatgtcacttcctgcctggatcatcacttctctactacatttcccagaatcctctttaactcctagtccttgcttgccattggccaaactattttattcaacaatcaataagataaacatacacaaaagtacttcccccatcaagaccattatagaaaaccacaactaatcaaaaatgcagagactaaaagatcatgtggtgcccagttccaagtgatacatctacaactcaacttctacatcgaagactcgggtactgctgtggaagagaatagcgggaagattgtaagagcaaacggaacaggaagtctactgtacaagtgtgtctcctagaaatgtcagaggagctatatctatgaagtctcaccaatacggctgcctaagcaagagttgaacaaggatcacacaattcacatgctactgtggaaggagggaagctcatgaggcctcaaccctagacaaggaactacaggtaactaaggagtagggggaagagcctcaccagggaagagcctcctcagttcatgggctgcttgtatgtagcagttcccactatcaaatggtcagccctgagatgcagcatgcaagtaacgtatggaccgaacaggttgcatttgtatattcaggtgtcagaatgtgtgtgtgtgtgtgtgtgtgtgtgtgtgtgtgtgtgtgtgccataggatctgaaaacagaaataacaggacaaaaaagagagagagagaaacagagacagacagaaacagaaagagacaaaaaccaatgagtgaccatgaatttgagaggtgcaaggaagaggtatatgggaagaattggagggaagaaggggagagagaaactgataggattataatttcaaaaactaaaaaacccttatatacactagctcatttcctatgcactggaatgatttgcctctgaatggatttcccctgatcctttcccttggttctttcctcctggatcctttagccttctacactgaaccagcagaacattaactcatgaatcctccaatgaagatgataaaaggaaggagggaggaaagacactgaagagggacactggtcctgactcgccttgctcaccttgtggagatccacagacacccagtgaggggtgtggcaggagagagagacaagagttgtcagcacaagccacctacaagtgtcacaccacaggatccaattcaatgctggagaagcttgaagggagaaatcctgggagattccatgggatctgaagctgaccaaaaaaatactgacacttgtcttttcatcacctatgagatctgcacactggcagttctcagataggaaactgcacttagtgtttctttctttattttgttgtctgtgtcagtatcttgcctgcatgtttctggtgtctatggaggtcagagtttgggactggatctcctggaactggagttacagacagttataggccaccatgtgggtgctaggaattgaacccatgtcctcagcaggagcaacaaatgctcttaactgctgacccatctcttctgttacttagtgtttcttaacaagccaccagatatgtctgtctagctaaagttcctcatggctatttataaactcatcttcattgcatgagtgttgcaagttacagctacaatttcaggcagttgcttaagatcaaagggaaatcctagaaatgggtgtatgtgccccagtccctaggagtgtccccagttaaggtggtacaatcagtgtaggttattgttcatagtaaagggcaaagaaacaatggaattccaaactgagtctagctaggtagcctcagagaccatgccacaagggccaaatgatgatcaggaggatgttcatatttttaaatgtttactatgcaccaggcatggaccaaaagactccaggcacattgttctcttaaacaaaacagtcatccaataaggtggcagttacctttcccatagtcgagagaacaggagactccattaggttcaggtgtggccaggtgtggttcaggaagcctggaatgtgaactgaggagcatctgactcgaccactgtgctgcacagtctcacagtgagtaacctgaaccatgtctactccttccagaggaagggaggctggggattatctaaaggtagacccccaatgagaggaggaaatacccagaaggcagagaacattcctccactcacagaggctcctccttgactgtgtcagcattcccactctccctctatggatagcttcccatcacacaagctctcaagtaggcatctaatgtactcaaacaaactgcaaaatctgagcttttaaaacgtccctgatctgctctcctgagtccaacaaatgaatctgtagagatgttgtcaacttggaaaatggagaaggaatgccccacccaatcaactcagtagatgagctttccctgaactatgggttgggaacctctaaaccagcagttctcaacctgtgggtcatggcctctttaaaataatcagaaaacatggatatttacattatgattcatgacagtagcaaaattacagttctgaagaggcaacaaaattaattggatggttgtcactacaatctaaggaactgtattaaagggttgaagcattaggaaggttgagaaccactgctctagactgtactggcatacccatcctgaaagtgggccaactttcaaaattgtgccctattttgccaaaaagctgaaaagtggttcagctatgttacccaaggcttctccaaatccatgtctgcagcctcttaggaagtgtaaaaatgtccatggggcatcagctctaccctgaagagttcttcccagacactctgacaggggtctgggaagcagttcagccacggctgggctgtgccctgggaattctagcagctgtgtttgtttcggttccttttgagttcagaaaacaaaggaaagagactgttttgaaccacttccaactcacttctttggatgccgtactgtctccttttgaaaaagttcttcatccggtttttaaaggcagaaagggggtaactgccccacagtccgtattttcctcccacctgctcaattgtgagaaaagctcacaacctaaaatagaaaagtaaaaagagctattcctatgactctcaggtaaaatcattgcaaattccaaatggcctgagcaaagtatgtccaatataattgttcataagttaaaatcccaaataccatcaatttcacagctccacaggcttgtgaatagctttaatcccttctcctctcctctcagttgctccaaagttgtgcttcttgtcctccaaggtccattgctttcctgagtcatgcagctatgggggagcacaagagtttcaaggctgggatgcagccaagcaacgtctgtgttccttggtgtcagcacatactgcccccgccagccaggctggtatgactgcttatttcctggtaggaaaaactgggcaggcgtgggttctagagggttggtaaggggcatgggtgttcaggatgacaagaggcatggtccaagactttactacgtgttgagattgccaccaatccatttaagactcagtcctggttctggacatggcggtgaacagtaagaaatacaggcaggatgtcagtctgaggccaggcagggctgcaacgtgagttcaagaccagtctaggcaatgtagtgaggacttatcttcaaaaagaaaaggaaagaaaagaagagaagagaaaagtaaagaaattcagcccttagcatggctcagtgtggcaaatggtactatctcccttctttacagctaagcaaatgaatgtttagaggtgggagagatagttatcctacagaaatgaaagccaaaatgcaaggtcaagtttgagcacagacatccactcctgggatccttcactctgctctgcagagtctcaggcaaagacagctttaggaataagtgaatcatttgaaaggcttctgcccagccagggcctcatagttctgcaagacttaactagcaaaccatgcccagagcatgtgtccactgaactctggcttccagaagcgttcctccacttatttacagtatgcagttcatgcctgatttatgagctgcccggggactgtgccttccaggttgagttacctatctctggcactatagggtcattgctttctctttcatcacttgtgcacagtacatcctgacaccttccaaatgaagcaattagtgatgactattaaaagaaatgtctaaacccagtgattgcaaaacccattagctgagcaaaattcagaaggatggggggagtccttccattacctgatatgagttcaagtagtagaggccagaaaataataagcaaattataataactaaagccaacccaatctaaaatttacaataaacaaaagggaatcagaaacctagtacttaaccctctagcagagtgtctcataggaacctatagaaaatgcttgtgagatctttgcaggctcttagccttgtcagtgaggtaaagcaacaccagtcaaaggcctcagagttactttcagctcatactcagatgcagcagtttaccgtgcagaggagaaagaattagaatcagctatggccctttggttacctgggattgtactagggagatcacccttaaattctcaccatagtggctattttgacttatttctagaggatgtcgatgttcacaatagtcctttaggtgccttattcaagggtacagccaatctcttaaacttcatttctattatgtcatcctacagaacacacaggtaaggataaccgaaggcatctatggctggcaaggtggaacatgcatggacttttatgtacttattatctctcttggcagagacttcactaagaggattctttttggatgcaaaacaacttgaaaaatgaatagaaggaagttgaaagaatacaaaaattacatttgtaggatgcagaagtggaaggctgagttcagtggtttgagtctagcatgtgaggcccctgtttgatcctgatccccgataaaagtaaaaagaataaataaataaataaataaataaataaataaataaatgaaggccaactgatgagctagaggaaagagaggggagacagtcttgcatggaaaagtacacaggagtatcagcctgcttggcaaaattaagaaagtagatggatttcaaaaagcagattcaaaaggtcacattgaaatggatagcttggatgtgtaactcttggccccagctacacccctccctcatttccaaatacaatataaattaaagttcttgcctataagccaagtaacagcctgtatttctctaatggaatagaatggtctaaggaagaactacagcagccagtgcagatagtagtgccccaaagtaaggcgctcttcattacctgggtctccactaatcttgagaaagcctaccattgacaacatcttatagaaccactgtgagtcttcttattgcttgttctggcagctgaagagaccatcaaaaatcaccagacatatgaggaaagcctacagcaagaaagacaaagacatcatctatccctggaagacaaaagacaattagagaacagaagagaacttatgagacagaactcattcagtatgccagaaatactcaagaataagtagcatgcatacaccagagagaggagatggtacatgctttgaaaagaacattgacaagcaaagcagatgctttggaacttgaaaataagatgttgaaattacaaaataacatatccatggaagacaaaaggtgacctaagcttaggaaacaacaaaaccaatggcaaataggaagaaagtagagggaggggtaggggagaccaatcctaggacaactgagattttatgattggaattctagagagcaaaaagagaatgaagggcagaagactatttgaaaggcaaaacacacaagaagaattctcagaggtgactaaagttacccttaaataccaagaccctacagagtgcccagcaaattaaccaaagatagatgtgcctctcaacacatgaaggaagacttgagaacagaagagattaataaaatgttttgggacttttctggagttgggtcaaacaatagaaacatcctcctaagtcatggtactaagctaatagttaaatatccgaagtctaggaaaaaaaaaaaaaaaaaaaaaaaaaaaaaaccaccaaccaaccaaacacaggacagcttgtttctgagggacaagaaccataggatctgaaaacagaaataacaggacaaaaatcatcatctgtgaatagatggcctgttagagaggtataaaagaagtcacagcatgccactgggtcttttattatccctcttcaagtattactttggggtgaaaacacacacatgcataaaaattgtatgataaaacaatggttgtaaaattttgtagactacaaattttttatactactgtataaaatatcctagggaatttatagaatagacattgtttttgcccatgtgtctagcaaagcaatgtttgaaggctgtatgcttcttgcccacagagagcaaatccacccttgcccatctattgcatctgaacctggaaggcagctttttgactgtgtgtaagcattaggctgaactcatgatgactgatgaatgtcacacagagcagtaaaataatttcccaaaaaggtcccttagtggcctggaaagtcaacaagcctcctccctgcataggctgtgccaacaggatataaaaaacagttggttcagtcgtggaaacgtcagcttgaaacagttgggattttctgatcttaactaaatgttttttttagaaactgaatttcgtcaaacctgtttgtgtaaatggggagcaagccataggcgcccaaggaggctttgattcttcctgctgctaaacacgctgggaaaaagaaacttcgggaagctggttattttgagcaatgactaattcctttagtgtttctttctttattttgttgtctgtgtcagtatcttgcctgcatgtttctggtgtctatggaggtcagagtttgggactgaggtaatggggtagagccctctcttggtgctgaagactagaaactcagaactgaggctttaaaaacacttggcaaacactcagaccatgtataagagggctgaagcagtgaaacggagactggatgcctgctcagtgtgggggagcgccagagggacatggaattctttaaactgcactggcagtgccatggggcttaggttgtccttgatggtattttcctaagccagatacctttctagttgactatatgaaaagcatccctcagagttagggcacagagcagactgcaagatccaactcacagctgattatttccctagacacaggcaaaccacaaggaaggagagagagagagagagagagagagagagagagagagagagagagagagagagagagagagagagaataaaaaaaacaaggtctcacaagagaaattgtctttgcagaaaaattcagagtacagggagccaaagtaggaggaactggccagtcagacaataactcaaataccacaggtaagaacagcccgggggaggtgcagattggtcatgcactcactcaaggaaggaaaacaagaagcctgaaatcatggtgaaactgtttgcccgaaagaggagttgctataaatatagatgccgtgggctagaaggaacaggaagaaaacagcaggcctgcattcagaatgaggtgcaggctccaaagtgatgggagcctcgggagatctgtgtgtctttgtattcaaaatgataattttattgagtttagactttgtgataacaatatcccttttgccccagagaagttttctggggttggagctgaagaataaatttcaggggagaatgccagaagcagtcacccatatataatcctgaagttggagatgctggccagacctcaggtggccccatgtgctcagttacctggtgtccataccttacacagtctcctcccctagagagtggttgaagtcctgtcattcctgagattgtcttgcagacagctgactgtggaaaaggccacagaaggctggtcctgggatagctgtatctgtttaaaagatcctccatgaggtttgaagaagtaagtagccatgttatagaagtctctgtctcaaggatctacaggtgacttagaaattataggaaatgctagaacctgagtttggttcccagctacagccagtcaggggctgaaacactggctcatggagtcataaggaagtgaattcggccatcagcttatatgagcttcaaagagggcattgtgagacctggggtagaagatttaccaatccgtgcctgaacttctcacccatgggacttgagacagtatgtggtgtaccttacaatatctgtagttatttgtcttgcatcaatagaaaatggtttctcaggtgcgaggcaggagagagccatgaagggtgagggcagatgacttttaacaggaaatggagaagcggcatagtcagctgatatccttcggccttagctcctcttcttaatgctaagacaaagtacctggccaatgtgacctaaggaagggaaggtttatttcagctcagggtttgagattgtccactacggaagaaaaagcatgatggtaggggtgtgagggctggggctcagtgtggtttctcttgattcactccaggacccagtttcctacctcagttaaacctgtctggaaacactctcgtagacacacccagacatgtagctcctggataattcctgacctggacaagacgacaatcaggattaactgttatgccagcatcatcactgctcttggctttcactcaggctccctgctgggcactgcctacagcacatccgatgcttgccactcacttattcccactttgcctatgataaaacccagttgtgtttccttgttacctagtttttcaatatagaaagttcttcaatattggccctacacaatgccaaaaagggaaagatttgttctgttctgttcatagtctttgattttacacaaatccttctgcaagaggacatacagaaatccttgcaactactgctcacctgcctcatgtcacatgtcatagctttctaaaataccttttttttcatgagatggtgcccctctctattctgatcctcagagtctgtctggtatctgtgaattgaatcaccttgacccagcaacatttatattttacacaaacacacacgcgcgcgcgcgcacacacacacacacacacacacacacacatttttacatttgtttatttgtgggagaggtgtgcattttctttctgtagcatgagtgtagaggtcagaggacagccttcgggagtttaactttgtgtataccaagtgggttcctggaagatcagactcctgtcctcatgctttgctgcagactctttactgacagagtcatctctgaagccttcacatatgtagttcttaacagatgttcataacttgaacagtaaattatagaaacacatgaatgtttctagccaagtgggggagggtctgggctccacaaaccaagcacacagctatactgggaagggagtcccaggaggtttctagtctacttcagtagcctgcttggcacttccttgctcttgctggttggtgtgtgttctaaatggctgtgcagtgtcttctggaggctgtaacagcagcatctgtgtagtatagctgtcagaactgccctggcccttgtggaggagaggttggacagcttttgatatgtagacaattgctcatatctgattttctcaacctccatttttctgcttatgtttcctgagccacaggtgggtagcatgcccttgctcaactttcacgggagctacaataacaacatttaatgctctgcccaggaactgtcagagttgccaacctcccctctctagccaataagctccttgaagatacggcttctgtgttaggttcttatctgtagagccctgtgtgtggtgtctgggactacagaggtggttagcagatgagagaattaaattaatggccagataggggcagcaacctaatctgacactccaaaaataagggaagaagacaagaagagggtaaatccatgaggtcaagggttttaaaaatgtcagtttattaggtgttcctcattaagatcaaccagaaagccaacaattccatcctgtcccacataattatgggatagcaaagccattttatgacattttccaaaagggtgtgtgtgtgaaaaggtctcagctgagaacaggaggtcaaggctttgtgggcagcagtgctgtgaggtgggagtgttattgagcagtaatgtatgtacatctccctttcaccacagttcctgatttctttctcttccttcaacagttagaggatattacaaatattcctttattgtgtttacaattttatgctgttaagacatgatttgacttcctgtagtatgttatcagttatattaaagcatagtgtaatttgattcattttaagtatgtcttatgctacctatttttaagcaaacagtaaggttaccgtaaaatacaaataaataatttcgtagtatctcaaagcaggaatttccaccacttccctcctccatttgcctccggtcttccttccttcaccttaccacacctctgaactgagagcctagaggagggtaccaggaaccagtcccagttacaaatgggggcttcttggtaggtctcttctcttcaggactccaatctcttaaccctgctcatacaacccaggcctgtgcctccccaggggtgcgtgtctttctctcctccccaggagtctcctccccaatggcagccatctcacagggccagcctctacagcaagggcagtctatgttcccccatatccccaggccacctcctctagcaactttagaatatgaaccttaaagccagtacttttagatcaaaatatcccagtttcttggagaaccctgcaatgtggattttgctctagccacacattggctgcctgttttagctcctggtgacccctctttcaccaatgcatcattcttcattgccctcagcatctgtgactggaagctgagcactgttcccaagggcccagcttgctctcaatgcagaggttaagcttgggtgtgttaggtgtctcctgttgctctatacgctctctagatgtgtctgctatatacatatgtattcactatatactatattctatgcgctctaaccctcctattccttccaagcactcttctacagcatgccattgcatcaatggtttcttcagtcaggactgcttttccttagacatcctcatagtcacctccctgaaaattttccagccccagctttgctggcaatacactccttcccattgcttgcatcctgggccacaattttctgctgtggtctaactctttgctctctatctttcaagatgcatgcactatttatttttcttgcatggagttccccttctatttctgaggtccactttttaaacaaaatataaactttaaactatcttatctatcatttctatagatttgatgtagggaaggagtttatcattttgagaactgagaaaaccctgaagaaaattgtgtcaattgtgtagatgtctaaaggaagaacattccagagattaagcagctgatggatggaaagactttggaggcagcagcctggttggcaggaagtggggggaacctgtagtggcttggttagatcagagtcgcctggggagaaggcaataaagtaagctcagagcaaagggaacaatggagtatacagagctgcatcttaggagccaggcagccattatgcagaattgaatttcaccctgggcaggacagaaagacacgagagaagtgaatcaacctagtatttctagatgatgttctgcctgttgagttaagaatagactggagagaggaccagggcctagcctgtgtgaagccctgtaatcaatttcagcaccacacactaagcatgacaacacacacatgagaggctgaggcaggaggaccattatatatcctcagttatataatgaatgcaaggccatcctggactatgtgcgactctgttttataaaaagcaaaccaaaatatgccatgtgtcctcctctcactacaacttagtgtcaggtggcctgcacggaatgctaccctggaccttctagttgctgatgaaaaaagaagattgttgaaggttattttaaaattaaatcaaaatcaattaggtttgcttgcaggatctgagattagcatttgctcatcagctgtgaatttccaaagccctggtacttctagtacctcagatgaagaaggtcttccagcccagctggaagcaggtactacctcacctcctctcaggctcactctgttggacaaattgcttgattgatgtcgatggaatcccacctgtaaacttgggataggatgaggtccttttgggaagatactgtggtatgccagattctttttagaactgactggatagtgtgagcgctttctgatttgtggagcaccatttgtacacggtagacttaatgagcaataagagcacattatttaaaaggcagtgaggtgagggttctacaccaattgatgtgtgtgtctgccctaggaaagaggtggccacctgcagtcgctgcttccaaaaggtgagccacaagggtgaactttgacctcccttcaacacagtgcttgtgacttgactggcagagcttgcttagctcccagacacttgaccttggggcaggtggtctcagttggagtccttccaccagttcagggcttcttgcaagggtcatgaatctcccagagtggtgaggtaatggctagagcagcacgtggccctccctgacatgaccccagccagccagagggcagccagtactaaagatcactttggcctgctgactcttaagcaggagggattcagtttcttgcctcatactttccatggctttgctggccaagctcttgaggctttgcaagcagaggaaatcaacttgtctaattactctgaggaactatctcacactccctgctcagggaatgctggaggtcaagaccatgaactctctaagttctcatatgactccagtgagattcctgaaagccctctcctgctaaagaatccagggcaaatgttagcagctatctttgttcctgatgagggagccagcactggggtcagattggctaagttgacaggttcttgaaaacaataagtgttggtcagcccagggtccagcactctattccacatgtccactcatcctcaatgtagctgtagtagaaactgtggttgataaagtacacatgtaaggatgaagaaaggttggtctaagctctcaagaacatggcagtgggtcacaggctaggtatgctgggaaagacttctgcccttgatatgtgctgtggctgtgctgctgctgtgacaaatactggacacagcaatttaagggaagtttattggctcacagtttaatgatctagtccctcatgtggggaggtagcagcggcattgtctctgtggactcagctcacagtcccctttttattccatcctggactccagctcagggaatggctctgtccagttaccataggtccttctgtttcagtgggattcctgcctgaccactcagaagtcagtttccatggtaattctaaagcccagcagttgacaacttcaaccattgcaccacaccgggatgagtaatttaatgaccctaactgtaatgtctttgtcttcaaaatgcaaaatgacagcatgagaactgaagattgtactggactctgagatctgtctcaaacaggccctctacaaggaaaagaagatgtcttcaaactgctccgtaaagaggttaccctcaaaaattggtggtttctcatgctgtgtatagttgacactgctgggtgcaggacaagggccctggaaatgtgtgtcctcggccttatgttgaaatgtaatctgtaaggccattcatgacaccctgctatctattcaggcagaactctgaatcatggaaccatttttttttttttttgtatctgtatcatgagattgttctacttgactgtgtcttagtcattaaggccctctgtccaacacaatgtgctcttgagggatgttgtgtgtcattctcaagcttcaaaaaggtctttcctcccaactttctgaaaatttccctataagtagaggtgctctgaacacaaagggaaaacagccagctccaatgaatgaagtaaaagcctcagggattgtcattaaaggagattcaactagccaacaccattcattttgtagcctgatgtggaacaggtgaggagctctcccctgcattgcaattgctgctccaagctcctagttgctgcgcaaaacctccaagctataactgctttcccagagcaaaggcttagacccacccagaagacatttaactgcataagcctccctgctgtggaaaagacagggtaccaaactgttaaagttccctttgtttcccttaacctggttcatacagctcttgcttttggccttgttttctgtgtgcttgaattgaggcttttttcccatgaggttcaagcatcaagttcatacaaaaatggaatttggccatttttggatcaagttcaaaaatggatcaagttctctgctccaaagatcagtgacgatctggggaaagcagactgagacacacattgcatctggagaggagcaaccatgtacaaaccaaagtatttccacctttggggtagttataaagagttagaacatactcataactagcagctcatgtaaacacatgggaagaattccttctctttgagctctcccttctctggagtcaacatgtgggcataaggattgtcatagaatcagctcatttattaatcattccatggcaagaaaaagtcctctcccacttaaaactaatcattatagttatatcactcaagctccagtgatctgctctgagatgattatgagcagcaagactgttttatggatgacaagatcctgctttctactgctggcttttggttcttttccttaattgagtgagtcaaggttgctttcacccactcagttgacctcaagtagtttcttgagttagcagttttctgtgagtgcacatctacatctgcatgtttccctccaaaagacaataccttaaaccctgggtggaactgaggagccatgaacagtctacaggaaccctagagacttaatcttcattttgctccttggttttgtcatttctcattcttcaacttatgtatcatggagccattagtaattcatagtatcacacacagtttccatccaatgaccaccccccctctgctttttcagagagaacctcatcacccagttatcttttaccctatagtacatgactggctagccaatgtaccaggagcatttattttaggtcaggtgctcagtattgcaaacagagacacggtggccaaaaaggtcaaaatatgactgcagagaagggactagggaccagcttcccaaaggtctcaaagggctgaaccccatgtgcctggaatggtggctcatttactttctctccattgatttctcttttcttcttcattcctgtttcctgtcatcattagccaaatgaataatccacaattaaggatatttttttcttgttttcttagaatctgcttttggaggtgctcagactaaaacaaatacaatacagggttataaaagtgtgagacaactacttaccatatcaagcctgatcttcatgtttatcttgagaaggtcagtgaaatacagagtccggacagtgtgaatcaaagctttgaatgaaacttccaaaaaaagcatcactctacaaacattcaagggaaagctggaggaagctcatgcccagcatatgattgggaacctctttcacctacaaccataaacttccagtgctttaagacaactcctagagtccttcatcgctaaactagccatcattcattcacagatcacaaagcctgggaaaacccttgtctgctaaagaggtgttcgttgtagatctgaatgcctttctttcattctcagcagctcactgtgacctagaaacaaagacaacaaattaatgttagtttgaaagcaagttacaagaaaaccttaggcatactagaaattcctctgaaactagatctgtcttgcatgttagagtgtaagttgaatatctctcacttctgtgtgtggaagttaaattctcctggttgtctcagagctgtctgactgactcaacaactctgacagtaatttctcttttagagtcagcaagctaattgacttgatcgaaaactttttgagatcattgttcctgttattttatcgtttgtcttggaaacaaccagacacatgcccaataaacattaaacacaagatcctttaaaaccataaacccaaaccaacaagtcctctgctgaagtcccgctatgcaatctgactgcattcggcataaaaacatacatttaaagctctgcaggagaagggtctggctctcatttagccgggagaaggtggagcatcgattcccatactttatatggaaggaaaaccctggataacctatggggccacaagcactctcaaccactgtcagcaaagaaagataggtgccttcatggatgtgagccttgctcatctcaggcagatgataaatggcaaatgcactcacaaggacaatacagaagttaaaattgtaagaagctgcaaaaaacaaacacgagccattgttgggccacacagggctgcaggtgcaaaggaatttgtgcccttttgcagtctttccctggagacagatttttctttgggctgccagctcacaaatagtgacacagagacttactattaattataaaagctcagcttaggcatgtttctaactagtacttataacttaattaactcatgtctttatatctatgttcttttacatggctcagttacctttactccacactgcctgtcctgcttcctctgtgcctggctggcaactcctcctttcttcttccctgagacctctctgtccccagaaatcccacctaacctcttcctgcctggcaattggccattcagctctttattaaaccaatcacagtggcacatcttcacacagtgtaaaggaatattctgcaacatttcccttcagacctcaccacatggtcctgttttgtctgacaggtagtggtgtcttacaaaaatgagtctgtggtgttgctctgtcatccaagcatctccagtttgaggacagcaagagtaaggcatggtgagtatagatctcaggagacagctcagtagtgaggcccttgcctatcatgtatgacgtcccaagttcaatctctaagtgtctcaggggaaaaggaaaaaagaagtttgtctcagttctgaagagtagaaaatccaagattgaggaccagcagattcagtgcatgataagagccatatcctgttcacaggcggtcatcttttctcggtgcgtatacatagcagaaagaggctgggggtcttcgtgatggctctgccatcaaagcctcccctccaaacactgacatgccaagggctgacatagatatatagaacacaagctgaacaattagtgaatatttaataaataatgaatgagaggatgaatggtctgaaaatgccaccctccctgggctcctggctatattcacaaagcaaagggatgatggctattgctacaactaatgcttcttcggtgtcagaactcaaacatggaattataccatacttcctatccctcttatctcactcagccatatcccaagcaatggttctgctctcctggcttcacctaggaccggattaaataggctagggtgcctttaacatttaaagggagagtgagaagccacacactggctccagatgctagtttggtctctactcaacctttactagaaagttgtgtactttgaaaatcactgagcaagctcagtacagtgtgtctcttgatcctcttagtccctatgagtttatggatgttgagagtaatggtttggatagtataggagactgctctgtgaagactagaagagagacaacagggctctgcatttttctgctctgggatttctccttgaatgagaaagaagcaagaaagaaaagcatactctgccatagacagacagtttgtgcattagtgctccagaggaggtgggcaggggtgcggactgtggtccatcaggagacagagctcctaggaaacaaacagcaaaaacaatacgaagaactatcagagagggaaggtggcaaggatggtatcaaacagcacctttagctgctgcagacctggaccctgcttcagagtgaggcaaactacgttctttcgctgaagagtgaactgtcttcacctcgacacacttgtggcaacccaggcacttctcagctactgggtaatgtgctcttaaaacactcagaagtacaggggtggcgttcatctgaaagatctggagtgcccatgtaaacaggtggagagcctggagcttggaaaatttgtcagatatggttgtaaatgttaatacttttctcacccaccagctggtaaagctggagagatgtcagctgcttgctgattgactgagctgtgagcccatccccgtggccactgaaccattccatctggcattaagactctgggattgggatggcttgggaagatggccaaagtgatcagatccctctctcggcagcctgtcccagcagctgcagtaaacccggtccatgcccccaaacgcattagtccagacaaaatagattttactttgggtttgatttagaagcgataatataaaaaatgggaacattttccatgaatgagtgaacataatcagtgtgctaaattatgaagttcagcttatgttatctaatggaagactgtaaagttacagaaattccatgtggggtcatatttcagaattatcatacaaaagtataaaacaaaaccacagttcatgcataagcgctgtgctaagcaagggtgcccaaaagtcatgagattaagcgttttgtaaaacttgccaagctaaaatgaccatggacttctcttgtttctttgaaaaacaaaacaaacacatcctccatttctactctagcagccatatgcaccacagcctctgctgtgtggaaaccaggcttttcttcctgaaccctaacaatgccttaattaacatactccaggatctggcttctttccctctcattaggaatgagttttaaaccaaagccttggacaaaggagtcaagtatatatcttgggtttctcttcatcactgtcttaagagcaaattaagtcaggcctcatcttcatgtgtctcagtgatggaagtcccagacgctggggagcaaccatggaagaactgcttcttttgtcacagtcgctgagaactcctcagacactcagcaatccagtattttgcttagtgttgctggagccttgggtgacagtcttaggaatgtaacctgtcctgcaggttacaggtgaacagcttctgcaactggctggtgtgagtctgtcctgccaggttagtggtgtagcagtgcagggatagggcaggcatgggggctcctaggctagtcttaatgaagtgaatgcagccatcagcacaaccactgtgaatgacggggcttctttgaaggtaggcacaggcatggtatcagatgactggccatcctgaaaattgtacagctaattttcaaccagttgctgttatcataaacccagaagagagagagagagagacagagagagagagagagagagagagagaatttacatgagctaatgtttcctgtgtcaatggattgaccaccactttcacacggaacagataagcaggaaagggcagagatgagtgtgatacaggagagttgcttccctaatgtgcctacagaccacctgggatcctgaaatgcttttcttatacaggtttttcaggctgcaacatgagatggatacttctttttaatgatctctagatggtaacatcaccatcctaggacctagacaagagtccagttagccatttaactacaatcacataccttaagagagctgagaagaaccatgatacaagattgtttacatctcaacaaatgactcaataacaagttgactaagccacatgagctcttgtctgtaatgggtggctagctctacctcttccagagagttgctgctgtacaaatgcaacgtctaaatggcattctgaatacagagttctaggctctttgtagaacaactgtccaataaatgcatgctgagattttaccctgtaaacaaagcatggttgagatggccaagatgtgacagggtgtctttgtctacactgtctagcctgagctgacatttcaaccccaaatcaacaatatgctcaatgatttttttcagtgaacagatgtaaatgtctaatacattgtttttcatgttttttagttgctttaaaaccaatgtggtcacaaaatgaataagcttgggaacataataatgtttataaagaacatatatgatcctataaattattttttagcaactatgaattactaaaaccattctatgaatatcttcatgcacagctccaagtgataaaataaatcctacacccagcacaatgcattggtctgcttttttgttgaggcagcttctccattctgggcaccaaatttcttctggagtttgtctgaactggtagtactctactggtgctgatgctgacatccacatcttctgatgagatctaatggtaccatagctgatgtgacagggacttgtttgggcacaggaaggagggtgtgagttcagtctccaccttctgtggtactttttgttgaaggtgacatgttttcccactcccatggaacatcatgttcatctacagaggagagcatccacgtccatgcaggctccttggggatatgggcatcttctgagatgcattaggaaaacaagacagcatacttgttactctcatgcattcgaacaatttatcaggccctgctgctgtctctcctccccaggcacaaagctgacttcctccccaaggcaactcacgctcatggaaatggcagcaccaccagcctgtggacaaccatagccttttctgaacatcctttccctggggccaggtttacttttattcttctattctgaacatttttgtatgtgctattgaagttctcatatgaacccaattaagggaaaataacatgtattaactatctaatacacaaaaacttgctattaaaaaaacttttcaaacaaataaaaatatcacacaccaaaattaacaggcctaaagtctatacaacttaatgaaactacatatagctagaattggcatttgaagtgaaaactgtgaagcttcataatacttttggtattaaatatattttatgcacttatcctccaccaaatccaaaaaatccacgacagagttagcacccgaaaaacaactggctttatttccttcttcatagctcgtgtccattacctgcatctactccttcctcatctctttatatttgtgtttactattctcctctcttcatgttaggtcttcatgtacacattttatcaatgtacaaaagctactgttatttcccatccttgcctaacaactgaagcaatcgcaggttaaagatatcttctatcctgactgacgttgtgaagtcagcaagttcctgtttggattctagctcaaggttgtcctccaagtacaagtcttttgcactatatttcaaagaaccacaaatgaagaagagaagtgcccacagggttgtctgtgagtgtgttgggtacaaatgaacattagtcagttgatgggcattggctgtgacactcttgccaggaaaatgactgtttttttcaagaactatttccatttatagagcatttgaaaatagcttccttgggtcctgcctccaagatgtattaatcatgttttgggacaatgttgctagtcactaaaaagctaataacattccatctgcagggtgtcatacaactggttagaaagtgaagtgatgaagccatttaaactactgtttgctactgggcatagttaacagattcattgcttataacttttaatagaatttactggttttaaaaaattaaataagtgaaatcaattggttggcttagccttttaacttccaagaacccagggtcttcatagcttgtatgaatatgtatgaagacaatcatctacttcagtggtccttaacccttatcaaaaagaaaagaggggatcttaaaattttgttttaaaaatccaaacattataagtacataatataaatatattttaatacaggaaacaggaggacactaggatatacaggtcaaagggtgtagagtagcagacagtagaagaacaagataaaaatataaactatggtatggagattacacttaagaatattcacccctgcatgaagaaccgcaggcagctaatgactgatgagatgagttagcttcttccaaccacctcatcagttgtccagggcagagtggtcagccctgaactatatacacaccaacaacaaaaagagacttaacagggtatagctgtgcaatacatacatacatacatagacacacacatacatacatacacacatataggtatacacacatacatacacacataatacacatacatacatacacacataatacacatacatacatacataaacatgcacacatatatacacatacatatgtgtatatgcaacaatgacaatcaaaagaaagaaaggctatcaatgaacagacacatagggtttgagagacggtaactgagagggactggaaagaggaaagagaggagggaaaatgaggtaattctatttcaatcaaaaaacattttgaaagggacactgtatgttgaagtcagcatttttactaaatgagtagctctctccctcttccctgctcccccaccccctgtactagaaaggcttggcaggttctaaacaggtgccctatgattctgttgtggagttgcagcccaggctggtgccactgtaacatactcacatgcacctgtgcaacaacacacgtgcgtgcaggtaaagtgacacgatcctgcatttgcttcccctaaagtgaccactttgctgttgacatgcatgcagtcttgtggtatactttaaatatatatgagagaattcatgttgaaaattacttgggaagattatgaaaagagcagcagcctcctgccttagactggatttgacatgaagccaaaaagtaccacgagagcattcttttatgtaccagggtccatgtgtggaggctgagccagataagtctcctgatgagtaccttcatctaactactcaagttctgcttcagcaaggttaaggaattggggctcccctctgttgcaggccacaccccctcctccccaccatactgatggtggctcatgagatctcagacactgaatgagtctctgctttatgagatctaatgccctcaggcgtaatgcgactgacagtatgatccagccacacatgacttcatgaagcatctacatttacaaggtcttctgggcaagttcagcctttcctgagcccaggtccatctggtgctgtagacgcatgttgattcctgtttgtctcactgcttaggagagggagctcagaagtgaaaagctcttctgggttaatttcctagtcacgcacgagtcctcttggtcttttctgttagtgcatagatgagtatacatcagcaaaacacatcagcatctgctagggcatgtcttcacctcttcccgacttcattagcttcgcctcatggccctttgcacagggacttcctgttttctgctctcccgaacccactctgtcgttgtttggtctcccatctacctaagcctgcttgttcctataattactattcagcttcacgcttgccctggaccactgacttgcttcccttcatcaacagaacattaactatctcgtggggagaggggtctccaaaaactagtctgagtctcctttcctgctataaaggttgtttagcagagatgatagaaacttagaagagcacagaaaaagttcatggtaacaatgagtcttaccaatgccgcctggtgactccgacatacaaaagggttgggaatcactttaaattgtttgcatcatcacaaggaaacagcaacaactcctggcttctttacaagtttgcaaagccctttcacactgattattcaaactttctttacatgaaaaacaataaaggtgacgcagctcgtggacagatggcaaataaatatcacactcattgctgagttagttattatctggatgacaatggctttaggggaaggattggagaagttaactcaaagttaactatgtctgttgagcatgtggcacaagcacactgacagacttggcattaaggaggctgatacaggaggaggaccatgaggtgggggccagccagggttacataaaaacactgtctcaaaataaaaggaaacaaaaggaaaagcaacatgtgatagctagttggtacatttgcataatcccagcacttgggaggctgatgcagcaggattgcggtgagtttgagttcagcttgtactacagagttctaggccagtcctagctacaaagtaaaaacttgtctctagctaactaactaactaactaactaactaacttactaagcagaaataactttgtgtctcttcatccgtaccctgaagtcaggttgctacatgggaaaagagccaggagcagccagcaggaacagggaacatctgtgcatctggtgcctaatactgaatctgcaaagctccctcagctctagctataattctaagaagggattttaaaaaaataagccctttaaataaaattcatccagttttaagtagacaaaagttcctaagaaaacactacatctgggaccaagaatatattaaacaaacctggggagtggaaaaaaaaaaaaaaactccatttctttttatgagtaccacatacatcaccaaataaagaaaataatagaaaatgttatacaaataacacaaaaatacatatttatgtgctggacattccagaaaatgaagcaaaggaataataatgtttaaatattgtgacattaaaataaagattaaaatcccaagataactaactttggtccaatcaggatagactgtcacaacctccaggagattagccagcttccagcacaagctctgacatcatcctcatatccaggatctgacctacctaacatcttgttctcttggtaaaggcacataaaacttaaatactcttgtttcaaacaatcctcacccatgtggacccttcttccagggctgttttccagtctggcttagttcattattgatagagcaaggtgatgattgacagctttcagccccagtgcatgatgattagcttagctgagtatcattaatgaatcttttatagccacacactgagaggagagtggcttggttcagatctacaaatgaaccttttccagtacaaaaacagacaaatcaaaccataaaaagatggacaccagaagttaacacactggttaaaggaggcctgggcatttttaattagtgctattctgaaattccaaacaagatattgcagccagatgtcatgacacttgcttgtaaaatcactattcaggaggctgaagcaaaaggctggtaaggaaggagttgagcattagcctgaactacatagtgagttggtggaagcttaggcgaccaagtaagactgcatcacagaaaaacaagacaaagatgcaggaacagcaccttggggattgtgaaaacactccaaaatccataaatgaaccttttcaatgtaaagtcacccactcctggtgggcataagaaacctctgcatagtcatggcttaactttcccaacagaatgggagtttgacttaggcaattaaaacaacaacattggatataaggccaggaagtctgaattgaccaaaacttctccctttggtaatttacataattgcttgcagtcttgtttcccctacagtcctcaaagtctctatggtgtgcaacatcttaaacaggagattctgtagaaaggatgctactctcacagtgggtacttcagtggagatgtgaacaaatcctaaaataatcatttcaaacaatatgactttggagtgtccgtgaggttctgatcttttctgatagttgctatagttattctctttttatttttcttgtgctctgacctatcaggagactgtatgctaaagcagtttgctgatggcagaactcatggggatgtctcatacaatggaactctccatttaagacacactgtacactcccgccagaagacaggaagcctaactacagatcatcacctctccttcctttcctctaaatccagcctcctagtctcacctccaactctgtagcagaccacatgcttccttagacatccccttccctctgcccccatctccagaagaccacacaaatcttcacctccaacattcctccccactcaccctgtcatcccaaccctgaactccagcaggcattctctgagaacctgccagccaagcaatccagcaagtaggccagcaggcacttgggcaagcttcaacttgatgggggatgtctttctgtgtatatgtttgccttattggttgttgaataaagcactgttggccaataggggagcaagataggtgggactaggaatcgaggagaattctgggaaatgtaggaaagagaagtcttgtgatccaaggcaggaagtgacatagcaggcagactcagactataagcagggacaagcagaaaatcatgcccttcctcttcctcctcctctcttctctgtggagctgccatgtgattccagaaagaggatgaattccacagcatcctccataagataagtctttataaaatatatagattaataaattctagtcattggccagcagcattctacctaatataagtctctgtgtgttatttgggggcctatgtggctgtggggctcaggaggttggtggaaagatttacccttatatcagctcttcactctccctcctctcatccaaacccaatccctgctctcacccctgactctgtaacagaccacctattctggcctttcctcactctccaccccctttcacaacagactaatcagatccttgtggcacaccatgcttttttccctctcgtgaactatctcagccccctctcccagcccatccccattccaaagtgtcagctccccaaaccaagaaactcatttttacccagaaactccagtggccacacctaacaaaggaccagaccaaaggcaacacacagccaccataccttcctaagaaccagagagggcaacagaaatcaaggaacaaaacacccatccaacacagacaagaccagatatcaacaaccagaattacaatcagcccaaacccagatgcctaaatgtcaatgtaaaaacacaataataaccaagacaatatgtctccactagagtccagcaacaccacgacagtaggccctgggaattgcaacatagaggaagcacaagacaaataccttaaaaatggcctttattaacatgatagaggtccttgaagaggaaatgaataaatctaaaacaatgaaaacacaaacaatgtacggaaatgaatgaaactgttcaaggcctgaaactggaaatacaatcaatagagaaaatacaaaccgagggaaagatgaaaagaaaaaagtttaggaactaagacagggacctgaggggcaagcctcacccacagaatgcaagagatggaagagagaaccttaagcattgaagacacgatagaagaaatggttatattggtcaaagaaaatgttaaatctaaacaattcctgacacaaaacatccaggaagtctgggatactatgaaaagataaaatctcataataacaagaatagaggaaggagaagaaacccaggtcaaaagcacagaaaatattttcaacaaagtcataggggaaaatttacctaacctaaagaaggagatgtctattaaggtacaagacgcatacagtacatcaatagactggacaagaaaagaaagtccccttagcacataataatcaaagcaagagatgtacataacaaagaaaggatattaaaagcattgaggagaaaggaccaagtaacatataatggcagaactattagaataacacctgacttctcaatagagaataaaagccagaacagcctggacagatattctacagactctaagagaccacagatgccagctctacccagaaaaactttcaatcacaaaagattgaggaaaagaaaggacaatgataaaaccaaatttaagcaatatctacctactaatccaactctccagaaggagctagaagggaaactccaatctaaggagattaaccacacccaagaaaacacaggaaataaataattctagatcagcgaatcaaaagagaagaaacacacacacacacacacacacacacacacacacacacacacaacaacaacaacaacaacatcagcacaacaaccacaatagcaaactaacaaaaatgaaagaaagctgcttgttgttatctctcaacattaatgatctcaattccccaataaaagatgcagactaacggaatgaatgcaacaaaacaaaaacaaacaaacaaaacaacaaccaaggatccatccttcttctgtatccaaaaaaacacaccttaatatcaagtataggctcacctcagagtacacaaatggacctaagaaacaagctggtgtagccattttagtatctgacaaagtaaacttcaaaccaaaattaatcatactcatcgaaggaaaaatccatgaggaggacattgcaattattaacatctatgccccaaacacaagggcacacaagttcataaaagcaacactattacagctaaatcacatattaatcctcacacactgataatgagagacttcaatccccactcttgacaatatacaggccattcaaacaaaaactaaacagaaagatcctggagctaactgacattccaaaccaatggaccaaacagacatttacagaacatttcacccaaacacaaaagaatataccctattttcagtacctcacggaactttctccaaaattgaccacatactcagacacaaagcaagtcacaacaacacaagaaatttaaataacccctgcatcctatctgaccaccatggattaaagctagatatcaacaacagaaatagaaaaaagtttacaaactagtggaaaccaaacaacttacccctgaatgaaaaatgggtcaagacagaaattatgaaataaattaataaattaaggactttctagaattgaatggaaatgaatgcacaatgtacctaaacttatgagacataatgaagatggttctaagaggcaagttcatagcattaaatacctattaaaaaaaactggagacagcaatagcacacctgaaagccctaaaactaaaataagaaagatcccaaaaggagtagatgtcaaaaattatcaaacttatggctaaaataaataaaacaagaaaaaaagaataaatgaagcaaagagttggatcttttattttgttttgttttttgagaaaatttagaagactgactaaccctcatccaagttaactaaaaggctgagagagaagatacaaatttacaaaattagagatgaaaagggggacataacaacagatgctgaggaaatacaggtaatcataagaacatactttcaaaagctgtactccaccaaattggaaaatctaaaagaaatggataattttctcaatacataccacttaccaaacttaagtcaatatcagatcagcaatttaaagggaactataacccctagtgaaatagaagcttcatatggaaacaaaaagcccagtatagctaaaataaccctgcataataaaagtactttgagaggtaccaccatctataacctcaaattgtacaacaaagcaataataaaaaccacctggtttggcacaaaaacagacatattgatcaatgaaatagaattaaagagccagacataaatccacacactatggacacctgtttttttttttttttttttataaagaagccagaaacacacactgggaaaacggcagcatctttgacaaatggtgctagtcagactggatggctgcatgtagaattcaaacagatccatgtccttccaagcataaaactcaactccaagtggatcaaagacctcaaacacaaaaccagacacactgaacctgatagaaaagaaatggggaataatattgaactcattggcacatgaaaagattttctgaacagaacaccattagcacaggcactaagatcagcaatcaataaatgggacctcatgaaacaaaagttttgcatggcaaaggtcaccatcatttgatgggggaatgttcttctgtatgctgtgaatatatgtttctcttttggttgatgaataaagatgttttggccaatggacaggcaggatgtagccaggcaggaagaataggaggggctaccagactaggggaaatctgggaagatgaatgcagagagtaagtcgtgaaagagacaccatgtagctgccaagaaagcaagaagtccaggcatcactgggtgcattaggccaaacagtttttaattaatataaacctctgtgtgtttatctgggactgaaggatgggacagaaacttccatcttcaattattaggacaaagtggtggcccacagaataggaaaatatctttaccaactatacatctgatagaggcctaacatcaaaaaatatgcaaagaattaaaaaaaaaacagatatcaagaaaacaagtaactcaattaaaatgctgtacaggttataaactgagaattcttaaaagaagaagctcaaatggctgagaaacattaaatttgtttcaacaaccttagctattggggaagtgcaaacaaaactactttgagattccatcttacacctgacagaatggctaagagcaataaaacatgtggcagcccatgctagcaaggatgtggagtaaggggaacactcatccattgcaagtaggaaagcaaatgtctgcagcccctatcagtgtggcagttcctcaaaagatgggaatagatctaccccaagatccaacaataccactcttgagcatatacttcatcctacaatagagacacttactcaactatgttcatttctgctctatacataatatcgaaattgggaacaacgtaatgtctcttaacagatgaatggattaaaaaaactggtgcatttacacagtgtaataattatttagcctttaataaaaaatgatatcatgaaatttgtaggcaaatgggtagaaaaaaaatcatcctgagtgaggtaactcagaaagacaaataaggtcatttattagctgttaaatcagtgataacaaagctacaatccatgaactaagaggctgggtatagggtaagagactatggggaacagaaggatctcccaaggaaagggaaatagagtagataattatgggtggatggtggcaatgactagaaatggaggatcaattagggaagtggaggaaagtgggggacaagggagggaatacagggagagatagataaaattaagagtcatttgaggggtaatgtgggaacctaatacagtagaagcttcctaaaatatacacaggcaatctaaattaaattgccaaataatgagagagaaagagccccaactggatatttcctgtcaacaaatgaagcttccagtaccagaaatgggttacatttaatcaagtttttgggcaaagggggtttcaagggaatcctcaaattacctaggttttcaaaaggactatgggttgctctccacaaactgatgtcaaggccctattgctgaagataatatgtacatcgaatgtagagaagtcaaaggcatgcctatatagagccttcacctctacatgctagtgtctttggttcaggaaggttctcttcacactaccaaaggaaaaccataacataacataacataacataacataaacaacaatccagctataaaccctttgatagatggtggtgttcagcctgcaatggtggcataaagcttgtgtgtgtaatcagccaataactgatttgacttaaggcccactccacaagagagaacacataaatggcactgcttgagtaaccaagaacctgagactagaaagcccaggaaccttggataaaacaaaatgctattgttctacaaaaataatacagtataaaaatgactcccaatgacattttgctatactcatagaccagtgccttgctcagccatcatcagagaagcttccttcctcctacagcagctggtgagaaaccttggaacactcagccttaaacagtatgtctccatcaaatccctccacccaggcatcagggaacccttcagaaaaggaggaagaggaggcaaaaagagtgtaagagccagaggtgatggaggacacaaaagaaagaaagccctataaattaaaataattatgcatacataaactcacagagactggggcagtttgcacagggcctgcatgggtctgtgccagatagggtcctagagctgaaagatgtggacacatgcccccatccctaacccagaagctatctccaagtgataaccactagcaaatcacaatctagttttctccaagggagtctcattagggaaaccagttactattaagggtagactgcatgctcagtagtaggtggtcaacagaaagtgaactcaacagcatctttggaggttccttgtcaagactttcttagaattttgtcttaattttattttacgtgtgttttctcttcttttatcatacaggtcttttgcatatatattatggattaccaattattgttttatgggatttctgagtgtgagaatgagtgagagtttgcatctgtatctgtttcctgtgccttttcttgggctcttttctatatctttgtttgttttgtcctgttcttacgtgtaatttttgttttaccttatcacattttattttatgctattctagctcattattatccattagaagcttgtttgctttctaataagaaacagaaagggtgtagatctggattggagaggaggtggggagtaactaggtggagtagagggagaagaaaccataatcaagatgtagtatatgaaaaaatccgttttcgacaaaaggagaaattaaaataataataattttgaaagaaggtggcctgtaacctgggcctttctcccagattcctggcaagcaatgtatctgggagccctggatcaccctggccatgtaagacacctcggagtgaaagcttggaccagccaacagtttaggctgatgccacacaggcagttctctccactgctggatactgagtgccctacaaggacactcactgagccacaagctggagacgctggctcacagggcaggcttctctcatctgctggccacatgcccaggacatcaggctgctgtctgagtagtatcagcagaagtcctgcaggataaccccacctgtctctaaacacatcattcactgggcatgtcattttgtgactcattactcgagtgagataatgataatgtgcacaagatccatgatgtgatttatggagaattctgagcacacacagaaaagtcgattaatttaactcaaggggccattgtggttagttgtccctgtggagtaagttattgaagcagctttaaataagggatagaatattaagccataaacagtcatttatattcagtttaataacagatcttcagattcaactttgacctctataggaccagggcatggagaaaatgggcagaggatgatttgaaagagtcaaagcaccaatgggagctggcaggatagggtaggcaatagaacgggggctagtggaagaagactccagagtctaaaagtgaaggcagagccctgctcagaacaatagagagacatggtttgcatctgaactcaggtctaactccccgtgccactttcacaagtgactcaacttctttccaggttatcgaacttaacacaaaatgataagtgagattagctcacccacaaggacccttcctggagttcaaacagcagagctttccataaggagtctctgataactttatgtcatgtgcttagcttagaaaaattctgtaaatgtcaacactgtccatgctacacatggtgatttgcaaataagtcaagattttaaaaatatctctcttataaaaatcctctcaatgttcactgtctcaaggttccagtaaatgttaccattgtcttcgttcctttgtagtttaaaatcactaaagatactttgcaaatgatgcttctaaggaagcatattttagctggtaggaagagggcaagtcagggccttgtcattcagggtttgaaaatatttatgttccaccattgtatggtttgttatattgttcaggacataatttattttgaagttttaaatcatggcaaagaagaatgttaagttatacttaacaaaattagaaggtaaattaccaagaaacagatgattatggcaaagttgtttttatgtttctctgttttctatggaaattaaaagttttctatcaaaatacctgctttagtaaaacaatgagcatagaattgtgaagtgttcttttaaaagagatgcaaaggagagctggaaagttctcccaagagcaaccaaatgatttatgaggatagatacatagagggcaaatagaagatgatgtaggattaaagggctctgcttagcttcctgggttgttgccagaaagttgagattaaagaagcaaccagtcagtgagaaactaacccttggaattaagctgaagagggtcctcaccacacacacataccatgtcaccaactcctcatgtgcacagagctctagcagcatgtgaactcataagtagtatccacacaatcttcataggtgaggtacggctggacttctggccttccaatatgaacttcaagttgctttgttaggctggttatacatgcatttgcagcactctgtctccaaatttatttgattataaaaataaatgtgcagatattcacaaaaggtcaggagctgtgtttgtggcactgcctcagagcaaggcttttgtctcctggggtgcatctaaatgggatgctaccaacaatttactaaacatgcttgtttgaccagttcattgtcacagctacaggacttcaacaggacaacaaatccacatagaagagcaagatgacccctgtgtacagcagcaagcaatgaaaagatggaattcataaataccacacgcagcactatactcccacccaaaaaaaaaaaaaatcaagtgctccaggacaggtctatctgacaaaaagactttataagtgaaaattataaaatattgccatgaagacctaacccatgcaggatggtgtattgtcttttgaaccagagcctgagcaaagatgtcagctccttcctactaatgtacaaccttgatgcatcccagcacacacttagactctgagatgtgtaggctttattcaatatgataaacttgagcagccaaaataattttgaaaatgagtggcaagcttcatgatttcaaaacccaaggtcaagacaaatcacatccatacagaagccatgccactatggaagacacaaaaggctttctggccatgtcagtcagctatgtcgatgggatacagttaagagtagagaaatagactcatggtcatttgactttcagcaaatccgccagtgagaaaagatagtgttataagcacatgacgctggaccaagtggactagcctgtgggagggaatctaacgacagtgaacttctgcccctcataccacaagcaaaggttaattctgggtaaaatctcaaatcaaaacaaatgaaaactggattttccaaagaaaacatgagatgccatctctgggctttggaggtgaacagtggataatatccaaaaagctataccctaaaaaacaatattgtactccactgcggacatctgttgaccccaagaactactaagaatgctatgatgctaaccagaagctggttaatactgctttcagtacacagacctgacaaataatgtaaaaccagactatgtagaaattcagttgagaaaaaaagaggcattgctcacttagcaatgaaacctatgaaagtgacttatttagcatatcacagggttcttagtatctttgatcaccagggaaataaaagttaaaggcatatgagatacattacacccactaacttattaaactaaagagctatcacgtgaggtagggcagtaggtaaagtgctagttgtgcaaggttgaggggctgtgtttggccccacagctcccacataaaaagttggacatggaggcatatgtctataccccattgctgggagggcagaattgggagggtgcctggggctcactggccagacagtccagctgagttggtaagctccaagttcagtgagagactttggctcagaaaataaggtggagagcaattgagaaggagatcggcctccacatgcatacatgcgtacatgtgcgcgagtgtgctcatatataggcccccctcacgtatatagtccatacacaaactaccaatagctgatgttaacaagaaaatgaagttgacctgagacctcagaatactggagacatgagcagtgtggaatgtctacccaagaaaacgtgattgaagtcagccagggagaggccgtgtgagctgcagagcaatgccgtgttgtaagaacatcctatacctatctgacttcacatcccgagcctcctggcctggctgcagggcttgcaactagacttagcatttgctttccttcctttttgacttgctttggttccatcctttcttgcagttctgctgtccctctcttgtggggtggggatgcttactctatgtcattgcctctggaaggaaatactttcctttttcttttccaggggttcatagctgacagcctgccttgggtctcaagagcagctttcagtttgacttttgagggcacttggtgataaattcactttgtattgagatggccacaagcctttgagggccaggggcagaaagttatagattgagtagctagtgttccctacagggcagatttgaacacttgatccccagtagatgacgtgccttgggattttcccagactttagcaggtgaaacctacttggaggaagggggctcctagaggtgtggttttggaagcttgcctggctccccactctttctttccctctgcttaatgtcttccacaaggtacacagactcttccttcacaaactcctgccaccatgatgttctgcctcttctgggcccagaatcaacagagttaggtagtgtaaagccatgaaaccatgaactaaagcatttatcagtgtgctggctttttctagctttatgtcagcttgacacagagtcatcagagacaagggaacctcaattaagaaaatgtctgaggttggaacaaactgtccatgcctccagtgtacagggcacagcagtatctctgaattgtgatccacataatgaaatggctcatcttcagggtatggtgtgtttccttcactagaggaggctggatggtgtttcgggctctcctggtctaaccgccattcaacagtgaacaggtgttgccggtgtctcttaatttaccagctgtgcactttcaggcttcttgttatttctggaggggcaccttggtgccatctttttaatgagaacaatcaggtattcgtgtttacttaccattcatttcctcttctgtgtgaacatacccaggtctcattgggttactgttgtctcattctgctgtgaggagttcaggtttctgtatgtctctgatgaacaaatgtccctgtggctatttcattgcaaatgtatatctagtttgtagactcccttttcacttcttaaaaaaaattatttttattaatgtgcacacgtgcacgacacacacagacacacacagacacacacagacacacacagacacacacacacacagacacacacacacacacacacacacacacacacacacctgttcacagaagccagaagaggaagccacatcccctggagctggggttacagttgagagcttctttacatgggtgggaattgtggtccccctgtaagagtattaagtgctcttaatatcttccatctctccagccccttcaatttttttggttgcccttttccaaacaggaaagttattctcccttttaagttgattataattgaatttatcaatcttccattatagttcctatgtgatactagaaactcacatcggatgtggtggcaaaagttgaaaacaacccagattttcacaggagaatactcagcatgctgcagtgtgttcctgcaacacagcactgtatttctgaatctgtctgtggcaggtcacatgagcccacatgggtaaacctcatccatgcaaactgaaacttgcaagcagcttgtggaacagcacaaaacggcatgaggggagtcgacttagaacaagtctcaggtgttactgtacacagcattttccaaagcccttgatattcatggcagaggttgattccagggagggaggggcgtgacctagaggccttcctgggccttcagagagcccagtgaggaccagctctgtcctctggagtaatgagtgcaaagttgttcatttttgtccttttcattttttgtaggtgtatttttatttattcacatgtctgggtctagcatgtgtataggtatctgtggaggccagaagagggactcagaccccttggatttggagttgatttatgggtggttgtgggtgggtgcttgaaccaaactcaggtcctctgtgagagcagcaagcactcttcattgctggctgcagaggcatctctccaaccccagctttatctctcttttttgtactttattcacatggtgtaaatatctcatttaaataccctgatttcccatgttcaccaagcactagagaattgagagaaatcacttggctcctgcccatgacattacaataaaaacaatccatgcctttcaacatatctccctggttattaaatttattttctctgccatgacaagggataaaacaaatgtcctttagggacagtaagatctttctagatatcacctctgtgtttgcagacacatttgctctttatttaaatgacaaacagccgtatctactgggcatttctccaaagtttaaattaaaaaaagaaaaagtagatcaagagaaagatcacgttccagcatggaaacacaaaagcaaccataaaacgtctctttctctgagggcatgtttgaccatcaagatcaccactgctttgcacatttatcaagcaggcttagaagaaggcagaaagatgactgagtcagacagaattaacagtttgtcatgagagaatgtagacatattcatgtttctggttcctactcttgtaaatttttttttagaaaattaattgaacatgacagaggaatgcaccaatggttaaaacaatcaggcagctgagagaccaataagaccaataagatattttggggtgagacatttttgcctagcatacatgtaaccatactcatttgctctcgctgctcccctgtgtacagacacatcgcagaaacctctctcaccacacagctctgtctcataaaacaagaactttaactataaagcagttgttttcatctgaaggactgaatgtggcctgtcgggacatgcccaagctggccttgcctgcctctgtagtaagatcagaccacttagctcccagcctttttccaacagagtcatattccagggtccttccaggctcatgtttctctacttctacagaaaaacagtggagtgtgactctcattttcatcttatagaaaataaatatcccttgctagcacatagaatctacaagtccataatgaagaaatctttgatgggaaagttcttggaagggcctgccatgtctaccctgaagttctgaaatgtaaataaatgtggagaccagtaccacttctttctgaaatttcttaaagagaaaggcttgatagagaacctgtccttgcagagttaggggagaccctggcttacagcacttggaaggaatatggaagggtctcccatgtatcccatccccttgggctttggagtataaaaatatacacttcagaaggagcccgtgtcttagagaaggacttacatggtagccagaaaaagcaaagcctttagggcagactgtaaatatgggctccctctctgaagggtcctccatgatacaaccaaggggacatattcacactggcccatctcaccttcatcctacactggaacagagttaccaggagcagacagaattcagtcaaaccaccagggggtctgggtcacttgggccccatcccacaccaattagaaaagacagcacctccattccccttgtttcctgccactggtcttagcagaagcaggaagttaagaaagcatctccgagcctggccctgccacttgccttactgtcaccacaagaagcacacactggagaaagaagagaaagtgagcttgcaagtgccgtttgaaagtagacagagattttcataacaaccccaactgaacaactacagcctgtgcccaaaatatcactcagaagctgggaaagataggtgacatagaccagggacctgtgagagatgagaagcggagactgaggcactgtcctcgggtctctgtgtgccgtaacactcaattccctccttccatctactcaattcatgctcacacataataaacggttttcaagctcttagaaatgattgctttttgttttaatatttctaaaatgttttcttattttttctgcttatgaatttgaaattcattcatgcttccatctatttgtcaactatatagtgtgttctgaccagcaagaaggagccatgggccctgtttggggagctggtacttcctggcccacagggcccacgctgacatctttcaagagcttcagtacatgggacatacaccccaaaggttatacggcacttctcagaccccacccattgctcttccaaccctgcctctgggattcctttttacccaccactccttgcccaataaaaatctttcttttgtccttgaaacaatcccaacatcttaacaatgttttagacatacaaatctccccgtttgtaggaaagggcatagaatttcaagtcagatagggctctgagttcctgtctgagttccgtttctccccagatggatgtcatgaggttgcatgtctcccctgggaacctctgtgctccaaggagaagagtctgtcttcccaggaggggatgctgtgaatgccatgtgagataatgtatataaaacactaagcattctgtaatgacacttaatatcataattcaggtgaatccgagaagatcacttaacctcacagaaccttagcgcgtttgcctttagaacagagtatcaataacaggcttgtggacttcataaagttgatgtcaaacccattgagataacaaatgcgaaagacaccgtcgatgttataaagagctattcaactgtaaggtgctgttagcatccataatgctgcacttctttttaaaaaagactcaaaagaaaacaagggagagggcttggatccagccataaagctgctgcctctctgggacatttgtaagcaatttagaaaccattcatctctacaggttactatcattctacttcaaatcaaagtataccaaggagatcagacccctcagcttgttctcccatctgccctctgaattccgtttcccaagaagtagaacaattcttcaacattttaggtgtcaggaagagtcaatgggacaaacaccccaaaggttatatggtatcagtataaaaaaataaacgatgtgcaagcacttagatagatactaggaatatacacatcaggggtctctataggaggagtggcctttgattgacttacagacacttcttgggagataagggaaatggccacactggtttttgggataataagcaactggtacaggagaagtaagatgtttggtttagtaagcatctagtgttagctagttctggtcaggggttagatgtgtgagtggctgtggtggagaattaactgctgtggtatagttgggactggctttctgccactagagccactgagccctgcctgagtggagaaaatcttctgctgaacttcccagccttgtggggacagcagggaacatagtcctcacgtgtggggtctctcctaccctgaattatctgggctctaccccaggcatttctaagcgcagaggccgggtgactgatccctgatgtcctctcccctccttttctcatttccttgatcttcccttcccagatttctcctcctatttattctctctgcctgtcagctccacctgtcctttctcctgcctacctattagccgttctgctctttattgggccaattaggtgttttagacaggcaaagtagcacagcttcacagcgttaaacaaatgtaagatgaaagaatgcatcacatctttgcatcatgaaacaaatgttccacagcataaacaaatataatacatcttaaactagtattccacaacacctaggcacttgtctgtgagggtttttccaaaggggtttactgagcggggaagacacatctggaatggaggcagcactgcccataggctggggtcccagacagactaaaaagctgactgtggacacaatgtgaccagctgcctcacactgatgctgccatggctacaactgctcttgccaccatgccttctcccacgatggacagtgtccttaaactaaaacaggaaacttccttcttgaagctgcttttccaggtattttgctaaagcaatgagaaaaatattagcacaggagttgatggatcgcaccaccctgccaccagctcaggcttgttcatgtggatagagcagggttccaagagaggtcaagctcagaagtatcccattgtcacttaaagtgcattctgcaggccaaaacaaaccatggcgacaaatttcagggatcaggacttagatccttccttgtgtggagacaggtggtacagttgatttttaaggagattcgggaccagcagagccttcagacactacagtcagttcagtacacattggaagggtctgactcttattccaaataggggacaggatcatggaaactaggagaaagataactgatggggcaaggaagataacattcaacatgaacaccaacttacacttcagagccttgacctgggtgataggtggcagcttctgaattagtttaagactgagccaaggatttcgtgtgaattagatcaaggcatccatggtagctctgagcagtcactggcatggagaacactggaagccatcaggattgtaaggagacgttaggaggccctgcaggacacagttaagcctgatgtgtccaccaaacattcaagtggaagtgttgactacacagctggtcacaggaacttgagcaaggatggagaaatcattgcaggaattgcttggcatacagctggtgcttaaggcttcagtgtgactgggatcaccaagggagtggacatagttaaaggagaaaggaaaacaaagggctgggcctagactcctccaataacaggagaagaatgcttccaagaagcctgagatgggtcagccagtggtgctgagggagaaccagaggccatggtgttctggaggctatgtgtggaaagatcataaaagaatggggagacgattagtggggtcaccactaaatccaacttctgcatgggaagtgcttggatgatgaagagcttgtgagggtttctctggaatggggactccaagctcaagcacatgcatattagcagaaaaatgtgctcttggtctgcctgagggtggtggtggtgagaaacaggagtccaatctgctgggggggggggcttgaacctcctgttggtagaattccctagtgcttcagatgggaacatcatccctgggtccaggcagagaagcccccaaatatcttagacatggaagtgagtgaggctctgaggagcagctatggtcagaaactacagttggtggagaagaaaacgaaagaaagcagacaaacaccgagcctgagaaagaaaaaatgtgggtgatttgaaccaagacgtttcctgccagatttgcattactctggctctggtgttcacgccctcaggtcctctaaccagaactccactgccctcagagtcccagcttcctcttcctgtttctcattctgcaaaagttcctggctgttcctgagagatagagggaccctggacagggagtaaaagaacctacacttaaggctcactaccaccaggagctacctgaattaaaatatgagtttcatgggattttcgggagaattctatcgaatgagggttaaaaaagtatcttctaatttgtaaagtgttatctaagtgttgggtttttattgctgtgaggcaacaccgtaaccaaaaagcaagctggggaggaaagggtttataaagttacacttcagcattgctgttcatcactgaaggaagtcaggacaggaaccaaacgggtaggctcctagaggcaggagctgatgcagaggccatggaggggtgttgcttgctggcttacttcccatggcttggtcggtccacctatagaacctaggaccagcagctcagggatggcaccactcaccatgggctgggccctcctgcactgatcactaaatgagaaaatgccttacagctggcactcaaggaggcattttctcagctgaggcttcttcctctgatgactctagcttgtgtcaaggtgacacacaaaaccacccagtacactaagtatatgacacgtggtcccagggacgggcctggaagatgttctttccatatagtgtcagaggagaaaagagaattacaagatgattccacactgaaggacttgggaggactgacccagagccagatgggaacagcagcatgacaaatgataatagccacccccccccatcccagatagcaacctggagctgtggcaggatgaccttgctgctttgtcccccatcttcactgagcttgttgtctctgtgaggttctaggtatgggagtacttgatcacccccaaagaaatcagcagccttgaggacagaggacaggaaaacagttttggaggaaactccctgggcattgtgagaaaggaatggtaggagaggcagacagcacttcagaggccttcagaaagtagcattcaggtgagggatgagcttgaggagaaagcaagtccagagcagccctgaagtcacacatggtgagatgagaggtgcataatgtgttgtatgcagtaggtctgtctgacctcaagtgacatctccctctaagaggggcttatcaaagaagcccgtacttcagcgcctactttcctaccctcttgaactgattactatctttatagtcattaccattagtttatgtggatgggtgttttgtctgcaatatgtttgtcatccacagatgcctggacagggtcagatcctttcgggctggactgatatacagatgcttgtgagccaccatgtgggtgctgggaatcaaacccaggtcttctggaagggtgctcttgaccactgagatatttctctagccttattaccatctttttaaattttaaattagactgatctcctaactaacccaaaagacataaattgaagtcattaatggaccagcatgtggtattttaatccatttatacactgcacaatgttgatatgaacacttatgtaaaggacattaaatcagatcctgtgctcctgtgttcaccagtgacagtgttcaagagaaggaaacagcttctgtgttcattaactggcaagtggctagggaaagcatggtctgtgtgcagagtagaatactattcagccatgaaaagaacatgtgacaacgccagtggaatcgttacattggtcatgttgagtgaatttagccagacataaaaacacaagccccacagtcatctgttgtttatgaaacagttggtctcacagaagttgggagtagaacagaggttatcaagctggggaaagcaaggagggagaggagtaaggggggcaggtagacatgtttaacctgatttaaatatcactttcttttgttttcctgtgttgtctctccttttcccctgatgcctgagggtggctttacaggctgctgtgcagataggccattgtctcttccacctttaccagctccctctcctcatttgctcctggcaggactagtgttaccagggaagggctcctagctgaagaggcagaccgcattgacttgtgtgtgaccctttccaccccctctgccacaccagaatagtgcacaccatttccaatataaaccatgcagctcagggcttctaccctgcagagcatccaataacttttgctgagccatccaagcccaagaaaaagtaacccactgtgacgaacaaaggaagctttagctcaggccagtacccgccagtaaggagaggcaggcaaaggcacctccgggcaagcatggtctttggagggctgccaagctggctgtcctgagtgtgacaaagcaagggaggaccccagtgggccccagtcaatgagaaacagatctgccctaaaaataataatgagtgaacaggcatggttacaaagtcttgcttcagagtaggtttggcacaaaatcagacctaatgataggttcagaaggaaaaattcatggttgggatttggaatctttgagccaacaagttatccacaaacaggtccaaagcacttctgctgcttttcccagcagggcttccaggccagggctctcgcctgacagctgtcctccacagaagacttcacagtcatttctggagtcgcctactccagaatagagggatggaggagaactaactcatgaggacacatagttccagttcatacatgcagggtcagagattgtggtggagtaagcttttcttggagaaatgggaagaggagctcagcagagggaggaccttccttagccctcagatatttattgagcacttcctgaaagatgggctctgatgggagagggcacaagactaacagcagtcatcctgcccacacactgcttatcaaagtgcacatctcagattgatttaaaaataagtgtgtgggggtgggagatgatggctgttaccaaagatgcctggagatcgtttcactcttgggccaagtccagatgcctagaaggctgtgcagaaaaagttcatgaaggtttacttgggttccggaggagcacagtgagggcctgggtctgtcagagctgtccttgaggatggaatggagagctgcctgtgcagggcccacctaatgtggcctattgtacaaataggaaaggtgagtttcaggtggggagggaccagctctacagctgagcctccactcccctccctttgaaaatggaatgtaacagcatattccagaaggggcagacaaggcccagtcacagagagaaagagctcaggaagaaaggaggagagacctcctggaggccccagggcagcactctgctaatatatttgtttttgtgggctcctatgagccctcttctttccttgagcatagaaagtcaagatgagtttgtcctagaacccagcctgggttgagctcagaagcagtttgactggtttctgtcataagccacagcttctgaacacacacacacacacacacacacacacacacacacacacacacacacacgagagagagagagagaaaaagagagagagagagacagagacagagacagagacagcatattagcaccccaaagttacttggaagtcagcttctctgaaatctaaggtcctgtagagatattatttctctatctctcttcagttaataagactgtataaacagcagatgctcatccaatgtttatatgtggggtaaatgcatgaacaaatgattcatttctgtttttagaggattcagagattgggggagaatgttctagttagagatagagtaaaatgttcactccattgttatttctaaggaataaataaccaccatcatcatgctctaactaaactttactgagggattacctgggaacaaacatatcaggagattgtttatcatacaatgctagaactccagaatctaagctctcacctaccacaggttgtcaagggagacggaggaatgccatgctccactcagatccgggctcacttcctgaaggctctgccttccctgaggactgtgcttccctcctgagtcttggcattccatccacccagcagatgaaaaaagtttagatgagaatgggggagattttaaaaatgagaatatagaaaaacctgcctttcctagactaaagagtcagagacccttgtctggattcctggggattgggaaatgtctgctggagatgatgaagaaaggaaaagaatttcactgtgtctgaggagcttccaccatgatgcactaactcatctctcaagacaacctggaaactcagatactacttttagtacttctcacaatcaaacattcagtaaatagcagaattgggtactctagactaaaggagctaggcctcttgagttcaagttcaagtagattgtctgttcttctgtgtattgatgactttcctgcccctgtgacttcaaatgggacataaacaacttgagagggggacagttttgggctcgtgtattctgctcaacatagtggggaagacacgatgggctccatagcagcacatggcagtagataagaaggagaaagagtaccagaacccagaacgaagctatagcccacctctgccagctagcccacacctccatattctccagactagtaccaccgtttaggagcaaggcatgagcctacaggataattcagatttgagccacagctctctattttcctcaccatatgggtactcacatgactggtttgggctttccttgagttaagcttctgataccatttggccagaatataaccttgtctattccccattgcactcatgttatgtgtgctcttagctctactttcctgaagaggaaatgcagatgagatggattacataacttggacttacttgtttggctgatggagacacagccaaagaccagtctgtatagttctttagtggcttcataagaatttgctctaatttggtcatattatcctttcccaaacttaattccacagtttgctttccctggaccgcctaaagtatttgtagggtcagggacctcaactttgaggtcacccaggtcagacaggttccttagtctccacatctgattccattctcaagacctccagcagcctgtggtcttattaactatcattagattggcacatctaatgctccaggaggttctacccagccaaaaccatacaggaagcaaagaatcagatatacaactatgttgatgcaagactagaggaaccccagactccagcaaggggtgggtggtctctccaggccaaatgtgagctattcctggctgcactagtggatgcagatgtgtgagcagcagccagggcaggcctctctgtcagactgtcttctttcctctcccacagtcttccccagtgtgggctggctactctgtcaccttgaccccaagctttccttgccaagaattagcttgcagagagtctccccacccccctccagacattcagtactgtcaaacatcttatgccggttggtctctgtggggagaaaacaggaaatgagtctaattaaaaccattgcactgaggaggaattcatgatgacaacagcaatgcgatctgagggaaacggtggataaaaacagcaaacaaacagtaggctacgagtctttggggcatttgacttcacagtatcttcagttatgaaagctgtacttgtcacaaaagcacactgttgagtccctgagctacaggatgccagctccctgccttccctgtgccatggcaggctacatttccttgtcgtggtgatggcttcagaccttcactctatcacaccatgctctttcagactaatcttcacgaaatcagccaacaaaggcagtgatggttagtgacagtgtgaagaacccttcctgtcagaactgctgataatctacttccatgaccaattacctgttcttcttgctgtcacaaaatgccagaagctgggtactttgttagaaaagaggtgtgttttggtcatggttctagaagctaagagtccaaacagcattgtgcccactctaacaaggggccctctgacttcatcacacaatagtggattgtacaatagtggagcatgtgcacagggaaggtcacacatggaatggggaggggttcaccttgttctttcatgataaccctctcattagaactcactgaggcaccacagaacctaacaatctcttctgaggattaatcacccactatgttctatcttacattgccacactcaagggacacattcaaaccatttcaaaaggaagtaccagggaggtggtcacattggtaacaagggacacagaacacccaggtttctggccttcaagtctacagatcctctctgctaacccacacttgggtgtgtgaaatagcagctgatcagctctcttcttcatcctaagttagctcctaaagagctgccttggtcaacggctgctgctcaagttgattctgtggtgtgtgtgtgtgtgtgtgtgtgtgtgtgtgtgtgtgtgtatacaaggaagatgaactgtggcttctcctccttctcaacttggtccaagaacctgggtttagtccttcctgatgaaaagtttctgtgccctgataagccactctgctgatgcagcaatataaatcagaccaaatgaaactgaattagaaaaatcccaggtttaatggataaaatgctcctggatgattccccctccccacccccagagaggagacaggaagagagaccaaaaacaggtgtctttttttttttcgggtggcagcttaaatacccctggaagtggtcttgagcatctctgggggaggggatcatcatttggcaagctttctgagactctgaagggtttggagagagatagatgagggggcttccaccagaacacccatgactctctactgaagctgagtttattggctacctgaatgagtagtgtgtctcctgtcctgattcccatggctatgaacttggttcacccctctgtgttttccttgtgctctgccaagaatctgtgctcccatgtttattggtctcccttgacgtccccctcctttaatctcctaacagagacagacatcatccttcatccatactgaaacatcttcagaataaaaatggggtcacaggtgggtccaccaggtagtatatgaactgaccattgttagcctctgtcctggtctcctctgccctgcttctcagacagtagtctctgttctattctttagcaaacatcggccctttctctccatgtctttgccaggctgcttattctgacagaacctcactctctagctcattctctcatgttcacacccacctcctggcaaataacttctttttagtcttcaacgcccagcttgtacaccatccccctgctgccattagctcagggccccatgctaaatgttgagatagccctgtgcttttctttgtgttgaaaaccttactgtagaagtgacttgataattatttttacatggtgacttattgtctatgttctcaatagaccaacagagagctgcattgtgaacaatctgcagggattggtgtggttgtgtgcatgtattgtaaacactgctctggagacagttagctgacacccctgtagctgtagcatctaatcatttgcatgtggaaagccaccaccagggagtataagcccattgtgatagaaacccctacagtgggggggttctgtaatacaaaatgctcattggatgaatacacagacgtgaatatcaattacaaagtcctcttaaaggatgggggtagggaaggtgtgtgtgtgtttcactagtgaacctttgagaacagatttgaagggcagcaagtgagaaagtagaaagccatctgccatttctcttctttatctgtacattccctactccttccccagaagtgctaatagtgcctcccattcttagctacccaaagctgtgtaacaagtcctcagaaactcagtaccctaaagcaatttgtgcttttgagagctaggagtgtggacacagctgatccaggcccctggcattaaagcctcacgggagctcttttgtatcagaggcccgagtaaacaaggttccaagcttccccaggttggcaatgcaaccaatttttttttttttttttgtagagatggctctcatggtggtctgctacatcacaataagcaacctagagagaagactctgaataagctgagtgctatactctcatggactcacagacacacagatgcacataacctcacctctgcttccaggaaagggtttaaacaattacagagaaccactagcaatgatgagtacaattcaggggtaaggaatgcagaatgtagggatcatgaactaatttaaagtctgcctacccaacctataagacatgggcattcgaatgggtaccattttctgacaacatacctttctgggaagtttcataagccaaaccaaacaacaagagtcatttagtagcaaggacctgtagtagagaagtggtgatccaggcaggaagtgacacagcaaggagacnnnnnnnnnnnnnnnnnnnnnnnnnnnnnnnnnnnnnnnnnnnnnnnnnnnnnnnnnnnnnnnnnnnnnnnnnnnnnnngctcttcctccagcggcgcaatgtgatccaccagcaagagagggtaccagcagaaggcatcctctataagataagtcttataaaatatatagatttatgataattaagactgagctagcagatgagaaattctagtcattggccaagcagctttgtacctaatatgtctctgtattattttgtccatccatgcagcgggcagaactcaggtggctggcggagactgcccatgtggcggtagggcttgggtggctttggtggaaagatttatcttaacaaggacccacacacatctgtctgcatttgttagttctgtgttgttgaggaaaaaggagccaaagtaagctaagaggagagggctcctgctgacaggaacaaggaagaagtgtgtgtgtgtgtgtgtgtgtgtgtgtgtgtgagagagagagagagagagagagagagagagagagagagagagagagagagactagcaccaaactctgcaagtgtcagactatccccaacatttgggtcctgccagggtatatgtgccatacttctttagctccaatgcttctccagttccaggagatgcttaaaatcaagtttctcccatagctgacctcaggaggcctcagtctggattatgctctgttactgttgccatcttccagggtgccttggagtaccaaaccctccttgtccaaagtaggtccaaggactgggcagcagattcctcaggcctgtgacttcatccccatggggcagagagttccttagaaatttttcctccctgagcaagacagctggactctgtctcctctacctgccttgtggcctcaagacaagggctcctgagggaaggctgacacataggccatgcagaaaaggctctccagtgttctgctctggtcccaggaagctctaagttggttctcttaaagagatctcttggtctgccatttaggaaacctgctacaaagttgatgggtaacaccaaaagctagataagcctagacaagggcttccttcgacagtctttacttctgataacctgatagattttggaatctcactctcttaatacggggtcatttccagggactccctttgcccactattggtctcactatattctcactgtccacaggtgttggtgtgcatgtctcaacttctagagggacagttctaggacagggctcccactccaataaatccacatctcctctccaaatacccaatccacagcacacggagaaaaatcacttgttaatcaaatattccacatcccaatgagttgtgtaaactagataagatattgaaactatgacccccagtttgtccatcatccttaacaagactttcaagttcactttgaaccttcttgtctaagcagagggtactaaggcaattgagagagcagacaaagggagaacgctttttaaccttttaaaagagaacaagatactttcaagttctttagaagagcctatttttatacagatgaggtcattcaaataactctggagccagctgccaccaggcaagggctttggacgttcccattgcaatcccctctgaccctccacacacacccacttggaaagccccttctctggcaaagcgctgcccttgaagtatgtaacttcaaaggggccacgggctgctggaaaaccttcagatctcttatctgagaaaccagcaaatgaatctgatgacatgaggaaagcctgaaattgaaggagcaggtccctcagcagggcctttgcttctgggactaacctctaaaggacactgctgttggtcccacctggtgtggtgatgtagtgaggaacatcaggagagggctagcaggtctgagcctaagtgtccctgtcttctgtcagttctttgtatgactcggagcaattagcctgttctctctgaccttcagtctctgccttgatctgcctttgctgctgacagtcacattataaagagaaggaggcaatgagttcatgggtaggaactgtaaaaagatgtagagatgttagttctgtatttcaaagtaccccatcagtcactttgtgacttacagagcatagactatttcctacaagctagtacaggtcataggaattttgtaaaattatgttggttcaattatggaatcaactacctatctgattaccaggttctatgcaggcacactaggaagcaacctggtgcaaaaattaatggtttgtcatttgaggtagctaggctggatctgaatcacggttttataatctaccatctagggatctgaagcagacacttcacctttcacagcctcggcatcttaatctttaaagtaaatgaatgtctttatgttctaacccctgaggtggttgtatttggagctggagcctctgggagtacttaaggttagatgtggtcatgagggtggagctctcatgacaggattagtgcccttcgatgaaaagagacactaggaagtttgctcttgcttgctctctttcttctgtgagaacacagcaagcagaaagtaactactgctgcaagcagagtgaatgttcctgcttctctgtttccccttcagagaaatccagaagacaccggggcctggtacttacagagccctagtaatgacaccgaatacaatgtgggggggtggtatctgtgaagagtgaggtgggtgacatgcagttcaatgaccaacaaatctgccttcttgctcttaatattagctgaagggtaatattaagtatatgagattctggttattgttttaatttatagaagatagctgacacaatgctgctgtatagcctggttcagttagtggcagatttcactcattgcatttgatatcctgtcaccaaacactttatgttccaggcactcccaaattatttatgcagtgctgtttcttccttttgtctgctcagtggttgtgtacctcaaaacagaagggatgtcaggatgctgggtccagaattcagcccttgataatgtagcacccacctggctgcccagaggaatggtctcttttctctctaccatgaagcccaggcagtcacagagaagttaccttaaattcccagaacacccactcttcagtgcttcttgagaccctcccactgtccatttatgaaatcatcctgcaattcaggaccagctcatcatcccagtgtcccttctcttctggaaccttagaaccaagctccctgacagaatgaagcccctcctccagtggtttctcatcaatcccaagagcactgtgattcttttacagcacactgaaggctggtggcatcctctcctactgctaggaaggcaggttctggttgccatctcaggaacacagcatccttggggaaaagaggagccagccaatgaggcagaagcagttggaatctgaaaaacctaggtcttagaagggtctttgtcttttctcatctgggggtttgacaaccaaaatacagctttgcctaagttttccctctgctgaactgagaaaataaataccaccatctcttaaagtcatttcaacaatgaaactagacaatccatatcaacagttggtggcaacagggggttgtcatgcaaggctgacctttgccttctgtgtaacaccttggcttagtgaggcccatcagatgccaggcctagagccaggcaaagaaactagatgggggaacgttcaacttgtctgctatgtcagcttttgtcacctactctttgtttctttcttatgttataactggtttaaatagtagaagccaagcgagacatggaagtgcatgccagtaatcacagcacttgagagtctgggggaggggtgtcgctgtgtggttgaagtcagcctggtctacaaactgagattcaggccagcttgtgttattgacccttgggctgctgcaccagcttctgcatggtccagtcttggaaaagacagacttggttggccttggcctgacacattcccctttcttccttcacttttctctctttaactttcctttcattttttcattctttcaactcaagagttgaaatccatgtgtgaaatcggacagtctgaggacagacattggctccacagcagaatgactaggcaacatcagacaacttatttaaggcattaggccttctcctgtgttcccttcctggaccctgtaagacctgctaagacccggatggagttacagagacaagacacctgcagtcagctgctggagaccaatccagaggcgtctgggagctgactgctaaattctcaggctagtcacaagccagatctggagtctctggtggatcatatgagccttggtgagattgtttccccacagaaactggcaagctttctcctgcactgaagctggtcgttaaatacttgccaattgccactattgtctggtcctggccatctttcagcacacccccttcaattctccaaaagagtaaacatagtgagaccacaggcttttggagtttctggagatgccacaggaagtcaacatattcagctaatgaacccaaaagaaggaaggaatgtgtgaatgggagatattccaataaaatgaatgggcatttccaagcagaaagctcaggggagatatcctgtgaactggaagacagcatctttattggtttttttttttcagtagaataaaataatccttcccttgacttgcctttgggtttactatttgacaaagaacaatgagatatgagatgtaaattcatttcaggtaattcttgattttattttactttgtgttttctacttattcatttaaactaagagttgatttctctgggtatgagcatggctttgagccacagaaaccagaaggacagtggttttgaaaggtaaaccttttctccgtgtcatgtgaccaaatctagagctggtcacatgacacggagaaaaaaaaaaaaaacgtgattcgaggactctagcggcttttgtttccttctagccatggctcagggcacatatccttaatatcacccatggtccaagacacaaaccagctgtacacagagagctgggaagtgaagaaagaggtgtctctgcccctccagagattttctagaagctgacccagcagcccctgcttggacatattaaccaccctcagctgcaagagaagcagagaaacagccttgaaggctgaacattgctgccctacataactcagacctcagctatggagagtcagcatgtgttctccgcccaaatgcctgtgtgtggagtagagagaagatgagaatgtgtgatgggggaagtacttctgtgtatgtttatcttattgattattaaataaaataatgtttggccaatgagacagcaagtaaatgggactaggagtcaaagaggattctgggaaatgtagtagagaagtgtgatccaggtagaaagtgacatagcaaggagactcatatttaagaaaaggagaaacaggaagcgtccttttttcctgtttgcctcctccagcagcaggatgtgagccaccggcaaggagggacaccaataaggcgtccaataagtaagtcttataaaatatatagatgtatgataattaagactgagctaacagatgaggaatcctagtcattggccaagcagctttgaacctaatacaagtttctgtgtattcatttgggcctaactcgggcggcagctggcgtaaagctcacacgtggccgtggggctcaggcggcttttgacggaaagatttatcataacaaacgtgtgtgtgtgtgtgtgtgtgtgtgtgtgtgtgtgtgtgtgtgtgtgtgtgtaacatgagtatgtttcaacatagaaataaaccaggatatgctgtaacctcaaaggatgtgcagtcttgacagcaaaatacatgtacacatgcacacacagccaaatgcacaagagcctatgagaagttaattaaataaatgaattaaagaagtacaaacaaacagccatgcagacagtgtgataattcaaattgacagcatctcagagcattttatgtgtaacctctatacctgatttttttctgtttagacttgtgtatatgcatgtctgtatgctattaatttttgcaaaggtagaaggaaatgggatataaaatgaggaaaccttttccagtttctactcttcttgctcctgctctgttacatcaaattaatgaaaaattattccaatgctcttacatgtatatgtattatagatgtattattctttgcacctttcttttaaaacaagaatctgggttgacacaaagattccaggattttctaccaactctatcagctgtgaaaattaccccatctgtagaaagagatatgacaacacctacctcagctagactaactgggttgtatacattaactctagaaaggtaccaggcatacatatagtatgagacaatgggtttttcctatgattgttgctatagagaagtaagttgaattcatgatagaaacaagtcagaaactgtatattaagccgctacagcatcctccttgttgccatatgcctcccttcgtattacttactgtaagcttgggtaatgttgcataaccacagggtagtcattaggtcaaatagactgtctaaggcagtacctgtcacaggaaggtattaattattgttttcttttccaataccacagaaccagtcctttttatttttatttatttatttatttattttgagaaagggtgtctattacatagctttagttgtctgaaactggcatgtagatcaaactggcctcaaactcagagatacacctgtctctacccccttcaagtgctgagattagaagcatgcaccagcacacctggcttcaggaccagccctgtaacttctccctgatatttagggacatatgactcctactttcattgtaggccaacagtgtcaggcactctaactccccttcaagtccaacaccaccagtggagggctttgatttgatggcaaacaaacgagtgcacatttgatgaaaagcaaagcaaagctcagctggaagacaatggataagagcaggagtaggaagcaggctagtgtgtggaattcagctttttattatctttaaccagaatgtatctcaactcacttgcctcttataaaccccgagagttggataccttctgtgattatcaaaagccacctaatctagaaagcgattgctctggggttgttggtgtcatgcttaggttatgtgtcagcaagggatttagaaagtgattccctttgaatcttttgctggaaaagaattttcagcaaccccatggtgggctttataatttggtatttggagcccatctaatttcttgagagaggtttggtgtctagtttgtactagtgttggtccctctcaggcagaaagagggcaatcccctccaccaccctccaagacaagctgaaaagctccaaactctcagatttgggagagcctactgtgcagctactgacaccttccccagacctatgagctctgaccagaaatgtcatccatcaccacagtgtcatagcaaccatgacagcacagccagtcactgtgaattggcaaggagtaaacagttgaacacactatgacattcagtcttcctaaaagttgattgaagtatgcaatcttattatcataatttttcaaacaacaaagctgaggctcagagaggttgaaccaaccacccacccgattagttaaattccagagtgaggatttgatcttgggataggacttattgatcattagatgttgtctgaataatgctatcaccaaaactggtcacctcccattggctagaattacttgttagcttgatgtgaagttaattttcagagaaaggaaggagagagagagaaagagagagagagagagagagagagagagagagagagagagagacagagagacagagagacagagagacagagagagagagagagcccagggtgtctatgaggctaatatggatggcagctgggctcatgttgagggccctgaggccagagagaacatataaggtcactgggcaataataaggacagggaggtgcaggtatctgtttatttttgctatatgcaaataggatctacccctggaccttgcaattctctccaaaatctcaatttcaagggttctatgattcctgtaccagatatgaagagaatggtgagatcaagggagaccatgctttctgtcatcaggcagctcacactcaggtactcaaagatatacactgcacagattcctaccaatgactgtgaagtcacagtggggacatgagagggtttcaaaggggaggtacacaatggcacaaggtggaaatttgaatttttggctctgtctcaatttcaaaggctttggaagcaattgttatttaccaggatctgttggtgactcaagaacctctaggcaaactagattagtccctagccctagaaatgaaaaatgtctacctaccgtgtgactgcttgccttggatacaggctcaggctgaggccacacggaaatactcaagaggcctgtaacaagagaaatcaagactggggccaactgtgcctatacacacagctgcttcaatgtccaagtaacctgatcttgtcttacatgcttttggtggcaggcagaagagaaacaatggctagaaatcacacaaatttgcctgaccttgcctgtgtggactagattatctaattccacaacacctgcacccaaataatttcaggcagtgtctgacagcacagagccttctacagatgatgcatgtctctaatcctgtaatttaaaatcctatcaaaaaagccagaggattgggagaaattatgttgaacagtgcaaatgcttccagatgagaactttaagtcaatttgtggatgaactgtttacaaagctccaaaagcacaggaagcttgagcttctctgggctcccacaatgcttccccccaccctgtcccccaggcccttggcatgtttgtacatccatgattttacttctttcccctccactatgtagctctcctacaactcacactgatgcccctatactcttcagcatctcttggattttccttccactgtatatatatggcacatggtatgggaaggtatcctctccagtatgtaccgtgtaaatgttctctggtggtgaacaatggcatcagcactgcttctgtctgtggaccactgagtcctgattctcactggaaacgttattttcttcatctgccatctcatccatctcatccttgctgccagtttttacttgactatcatacatgtcttgccttaaaaatcccaggtcttttaaccacttgaaactccactttgttagctaagagtccctaaacacccacttctttgatgatgattttagcaccaactctttccatttccatgcatgttatcagttctggaagcatcaatattcatggatccatgcaggaaactcatgcatctcaccagccacctcattctcaagttcctgattccaatgatctatttgatctattcctttaacccactcacctcatttacacaacctcatcattgcaccattgactttgttgtgatctacccatcctcaatttccagggttgttctgtgtgaacagtagctctttcacatccagctcactttctctaaatacttttatcataaaaattccctgacctcctctgatgacaagtgcaagagagtgaccatcggtgaccatttgccctcctttcctgctggactagaggggaatttgcggaactcattcctttaaaagacatttaataggccatggagacagctctttctggacaggtcttgctgtgtaaacataaggcacagtcttgcaattccagtgctgggaaggcagggataagtgtattcctgggctttgccagccagctagcctagcctgcttggcaagctctaggccaatgagagaccttgtttcagaaaaaaaacaaaaaaaaaacaaaaaaaaacaaggtgaataactcatgtaaaacaacaaccaaggttgatttctggcctccacatttgtgtgtacacacacacacaaacacacacacacacacacacacacacacacacacacacacacacacacaaacacacacaccatgccactaaatcagctcactttcatagtatggaaccaactgggctaacttgaaacctaattaagccccactgtgacctattatggacttgcaattcacatagctgaatgtttcaacaacaataataaccacaaagcataacttgatcacaaacctcacagccaccagagcagacaacgtgcaagttgtcacacttcaaagctgttttccacttgatcttctcgcctcaaattccatgcacctgtgcccttccacccttgaccttgcattatatttcactaaaaaaaagcaggcactagacaaagaactcccttttctctccatctccaaaggcccaatctgcctgtaccagagatgctgttctcctcgctggtgtgggggaaggcttggtgcctctagtgaaggtgagaactctgtctgatctcaccctcctctttctcctagaatctgttcccttcatcaccttccttcttttccatgtcagtggttccctctctactaacatctgatcagcatgcatgcacatgtcctcatctttaggaacagaagctcaacatcgaatctccttctttacacaacaaactctctgaacagtaactgtggccagtgcccctttccagcatcccctctgccccctgcagtgggcttgcaaccattccctctgaaccaagcccctctactgagatcaacagcacagtgtagttgattccactgtctgttgtgttctccacatcagaagtacttgatgtggtggctggcgattgcctctcaaatcattcccttctcttgccttctgtgtctccaccctaaatggttctactatgatcgatttgtaaacactatgctgaagggaactcagggaacaagggaacaatttggccttgtctctctctggaaactttctttattctttgttgttgttttctttctttcgagacaggttcttatatagctcaggttgccctcaaactcaatatgtagctgagactggtcttgaatttgtgatcctccagcctccacctcccatgtccttacacacccagcactgtcctgccactttcttataagataacctttagaccactatggctgccaagaaattgagtaattgaactgtatttctccagattgggacatactgtatgcatgcaaactcacacaacacacacacacacacacacacacacacacacacacacacacacctaagttttaaaaagtaaactatttcaaatagtgttaaaataattacacataatttgttgtattatgaaatcagagttaaatacattattcaaattaatctcctgtggttcattttactgtttgaatgactgtcttttcttagtgtagttactagaaagttttaatagcatttagatcccatgggattagtattccacttttgtnnnnnnnnnnnnnnnnnnnnnnnnnnnnnnnnnnnnnnnnnnnnnnnnnnnnnnnnnnnnnnnnnnatcccagctgctgtctgcagagggatagatggcttaaaagatgactgtttaaaagacaaaagattcatgaagtctgaagagaacaaagagtaatcgaagccatccagaatcttatattctgcctcaaagactctccagaaactctggtcttttaaacactcacaggtttcctgaaaagtgggcccaactttgtctcttatcctgcaaaaggcactctgtgcatccctttaaggccacatctgccttcagtgttgactgagtggcctgaaattcagatgacacactaaggagtaggacttagacctgacctaaggaaaattcatctacaattttttctttcagagaagaaggtttgaaacaaagcctcaagtagcccagggtggcctcaaactccatatgtagtttgagggtagccttgaattcctaatcctcctgcctgagctccagagtgcttagactataagccaccacatctgacctgatttcctaagtagacagaagtcagagtgacaaccaaagaagacaaatgaaaccctgaaaactcaaaacagacttgataatttctatattctaagacatgagaacacaaagggaatgtgtcttccttggagcccttatcctttctcagatctggtttccaggtctgcctaacccaacaccatctttccactaattccccagagtttttttttcatttagatcctaacctgggatttttcagtgaaagtatcccaagactcagacattttatcttactcgttttcttgtttattttgcattaatttctttaactgttttttaatctccacaatagtgtgaagtgtatagtaacaaagaggcaaacatcaggctttgcgcttacggagattataatctaggagggaagcaatgtttgaaaccatgtggcctgtgatgtagatcactgaaatgctgtaacagaaaacagtggggtaggaatgatgttaacctttttttccttatcatcaatttcatcacataaatttgcctgttgtaagaagataaaccatacatgaggaaaaggtttgtcaactcctcacctctttgcttccaaggagaacctgagatacaaattccatgaagtagcagctggcatccaagggacagaaggaaattttaaaagaacaaagtacaacacaaacagaaaagagaaagtgaagcaaaatgtgccagcattgagttgctgttattaagtaagtctgaaataagttctaaggtcaatgccatggtggaggccggtaccacacacaggatcttcttgagatgatgaaacacatcacaatctgcataatatttgaaaaagaaacaacacacccagaaatgtactcatctcatctgcatttttaaaactttaaagttatagttttgtgttcttttagagaaatctataattacctgaaggcaacagcaatatttttctagaaaccatatagctcttcttcctgatttgtgtctgtctactgcaaaagtctccccaatagaatgagatagtccaatttaattcattagagcagtgagacattttatgtctacacattctttgttaccccttaaacttgacctgcattagaaagcccattggcctagtatttcaggatatgcttttgttggcatgataaaacatttatactctgtattaatattttattctaatttaatagaatccatcaagcatttttatctcatgaaatgagagataaaatctgcatgttttttttccttgaggacctttagttaatttatcttctttgaacacaatgttgaaacaatttcctacttggctacagtttatggccagtgacatatttacttattcaatcctctttctccttattattagtgatgaccaccagtgttgatcagccctgcctgctgtctcttgctgaattaatgctccttgatgatgttcctaccttggtggattaatgtaaactcttttctgcttacacaatagaaacaactgtttacttgtacacttcttttttttttttgatgcaaactgcacgaggctttattgttgttttaatgagctaaccccatgttagctcgggtctttcatccacccaccatggcggatggctagaaaagacagctcaaagagtctgcatagagatcttatagggcagcataaggggagtgtctagggatatgcacagtcagatgcctgccttgtggcaaggaaccaatcagaagttggctggtggtgctatgctttacagctctgggtgtgcttttcggacaagtgcactgcaatgacgcacagagcatagcaaccaccctgggaggacctatgggacataacaaccagttgaccaatcaacacagggcaagccctccaagcctggaggcatacttgtacacttcttgaacaaccatccaacataagatagattatatacatagtaaactagttatagtgcatacattgtcttgtaaattgacacctttttttttatttcagtgtcaatcctgatgactttggaaatgccctgatgtgttctgatacagttaatttatgactgggacctagcaaacttgtgatggcacttgcaaattcaagtgatctagttatggttctagtcccttgtgtgtaaagtaccagtatgtaagtcctacctttctcactgggcttcttaaagaaggaaagtaaattgccctatgctgcaaacacaaaggcaaagactatagaaggcagtgatgaaatttctttctggtaaacatcccaatagggtacaaggccaccataggcccttgaaggcactgaacctaaatgccaaggctccaatcaaaggagccaggtttgtgctcttggggcagggaatgtgggggctgatgcttttgcccaaatatctaggctggagctgcctggtcttacaccatttttccagaaccttaggatagcgcaaggtgtgcatgtgtgtgagtgtgtgtgtgcatgtgtgtgtgtgagtgtgtgtgtgtgtgtgtgtgtgtgtgtgtgtgtgtgtgtgtattggaggtgtcaagacatgttgccgaagaattactacacaagaccccaaatcttccattgccttcccttttcattgagagtgaaagctaacttgtttgcagtgtctgctatggctgagcacactctggtctggttccctaggacttcatatcttctctggtccctaatcatttgggctccagccatctgtgctcctgtgctattccttgaatgttccaggcatgctccagtgtgagtctcagcactgcccttcatgtgtttggaagacttgcatccagacagccacaggcttccagtctttacacagatgtcattttcataaatacatgttggccactctgaagctgcaccaaagctccacttttctgcattcttgccacttggttctgctgagtaggtcctgcagatttcctgtccatagcccttcagtctgcctttagctcctctctgcagctgtgatggacagcaatgcacaagttggcagctatccctgttaggcatcttatgtccgttttgattcctggttgtgttctctagaattgaagtctattgagcttgctcagccttttgggggcagtttgaaggtcacccttcactaattgccaaaggagctaggggagctgttccctgtttccccccccccgggggggggctgtcctacaaagatgcatttcatagggttttacagtgtgtctccagccctgttgacaacaacaggaaatcaatcattaactcatgggctcttctcccttacctttccagttcctgttccctctgtgtgctttctggtttatggacaccaaaactctgatttcaggatctcctttttggtgaatccaacccataccaggacatggcttggcttctttttatttcataacacttaccattctctaatgtggtgtttgcatgagaatgccccttaggctcatgtacttgaacacctgctccccagttggtagcactgtttggggaggttatggagaggtgtaaccttgctggagaaacagcacagtggtgggctttgagaggtgatggcctcatccacttccaagtggcaatctgctgcattgtgcagttgaagatgttatagctcaccttcctgctctgattccttacttcctgtcttccccagcattgaggactctccctttgaactgtaagccaagaataaaggtttcttttctttttttatttatagaactttattagaaaacagaaaaggatataaataaattatgaaagtttatagctatagcatactgaagacaatgtaacaaaatagcatttaaagtgacaaataagtaacaattttcttttatgtttctcttatatttataacaaatatattcatgtctgtgcctgcattttcattcctattgtataatctgtatcacacaccatttctttcctactgaacaattatatttcctaatgttttacaaagtctgtcctttcacttacaggatctagaaattataggagataagaagagcatagctgtcagatctcttaggttgtttgtccctaagcagaaacacacacacacacacacacacacacacacacacacacacacacacacacctgtttcataggaagcctggctactgactaggaagagaaagtttgattcctgtgacatagtgtaagtcaagtgtatctctgtcctctaccttgtcacattgtataggccgaataataagtgtttgcttcctcatggtgaccttgatatattttatgacatttgaacaaactgctctgcagaagcaagtttcacgttcaaattacttcatataacatatttttgaataatattaccaggataaaggtttcttttctaagttgtttttagtcatggtgttttataacagtaaggaaaagtaactaatagacatactgagttaatttctttctttccttattgcttatgtatcccctccaaaacataagccttattctgatattgacataataagaaaatatgtatttagcttttatcctgtgtttctgataaacaagactttcaaagacccctggcctctctggagtgatgagtgactttttgcttgtgtgataacttatggatggggcaggaggtctggtctttagactgcttcaggatggaagctggttgccagtataccaaggcaggatgaagaacctggaccctggagcaagacagattgagttaatcatcaactgctaataatttaatcagtcatactgtcataatggaatcaccacaaaaaccctagatactgccagtttgtgaccttccatattggggtgtgtgtgtgtgtgtgtgtgtgtatgtgtgtgtgtgtgtgtgtgtgtatacagaaaggtgatgtttcccagctccacaaggacataagcacctgtgctcaggaatcttccagaccccactggatgtacctcttgctgcagctgctcatctatgtcttttagagcatccttatagtagacaggtaaacataagccaagagtttccctgagtcctgtgagccctgtttggctatgtgactgatatgtagggttgagagcagtctgtgaagttgggcacctaccccatggggtctgcactaattccaggtaagtaatttaaatttgagttgttttgtaggataataagtttgcataaaattagaggacagatcagtgtggaaagcccgaatagtgatagaagtgctgtgattggaggaatgggttacttttatcatgaagatggagacttttgctcatttttccacggacatattttaaacatgtatcacagggcccaataagttctcatagaacactgtcaacagaattaatgaaataatagagcttgatgtccttgtcctttcaggattttataatataacaatgcaaacaaggaggcttataaactaatgctttcaaaagttggaaaattgaagatcttagtacagacaaatttgatgcctggtgaggctcggcttcctcacagatgtccatcttccctggaacctcatgtggtagatggtgctatgggtcttttaagggtctcttttagaaaggcactacccccactggtgagagctctaactccctgacttggtcatctgccaaacacctcactcaccacacaatacccctaactctgttcagaagccttttccttccatggccccagtcctctcagaattgccacctcaacatctattcttactttcccatccagtaactctctgactctattcctgggatactttcctgatgctccggaaacatctggccaccagagagctaaacaaatgaaccatacaccttactaagagaattcttgtgagtgttgtaatccttgctcctcagccacagtttaatcatctctgagtggatcaatttgccaatgcagagttctgcacagaaaaagaggagttgcatcttaattgagcatgctagctttaggatcaggaagaacagtctttccactctgcccagtgttagctatgggtctgaaagcaattccctgtgaggaggagatgttgtatctatcaaggctggtaactagaatcttgatccacgctaaagtcactgtcttaacaaccactatatcttccccatggttcctctacctcacctcatggcatcctctaagcagctgcaccctcctgatcacatagggtgagtaggccaatggtgtgtgacatggctctcacatcctgcttgtcttgaagtcccattgtgtattgaagccatgcttcctatgcctgctccctccattcatcaaatctacacacagtttcatacatacacgcactaacatcgttcttggttgtctgggcagataatccatgctcccctggaaaacaaagacacttggcatgaacatgaaagatggacacttgatggcaaacagaagagtttgcctttgtttacctgttggctttactacctcttgcctctgtactaacactgagttagggagtagatgatgttcacaaacccgcactggctccctctggcaccagaaagaatgcataattcagtcgtgtctcattatatgatgctgaacaaatgacagttctcctagaacccatgaggtcctgaatgaaggctgaacacagaagcatcacttttgactctgaggattcgacacacaacagggaaaaagcagcctgtagttctgctgttaggaagccaccatcagtatcagagtccaaaggcagaggtggcaaagcctgagacagtttgttcctttctcagagcctgctgcacagctgggccttggatattcagtaaacaaagcaggtaaggctttactctccagaagtctgattctctctatcaattcaaatgggctcagagttaccatggaaacatgcccctaggtgtccctctggaggaattttcagaaatatttaactaagaaggaaagaacaccaactctcgtgtttccatgcttccagcctgtggaggcaatgtgaccagcagcctcgtgctcctgccatgccaccgtccccaccatgctgaactgaacaatcaaactgtgagccaaataaaccctttcttacataagttacaattgtcaggtgtcctggtatgggaacaagaaacgtaactccagcagtctgtaaagttcacagccttaaaaagttgggaggaatttaaatgcttaaaggcagaagacagcatcatggcagagctgcttatagtatcccaggcaagccccaggacagaggtggtggaaggcaaaggaataattgcacacccacagagacactggcaggatcaactgaggacacacaggcagctcttttgctctaagtggctcctttgtcttcatttctacctatgagagaatggtttctttcttgcagattcaaatttccagcttggtttttatcttccttatcatatctaatttatgataactgcttaaagcaaacctttggcattcaacatgcagccagccatagtggaagtggctcccctgggaactggctgacctggacagagtctgtgagtgccagagcatgacaatgaggggagggatgttcacccaggcactagaacccaaagcaggtgcagtagcctggaactttctcagccagacaattgccaaggatgactcaactccattagggtgcactgattaggcagagccttgcatgccaggtgcaccactgggcaggttagtgggaaatcactgtcctagggttccagctgctatctttgccaaagaaccaacaaagagacaaatagaataatgctaataaaattgttccagtatctgaattttatgagcgggaggagagaaagggaaaggcagtactttcgtcaacttagagaagccaggaatgagaaagacagctatgtgatccaggtcaggcaaatatctgcacttggtaggactctgcaaccttctggccacaccatccacctatgcaacacttaagctggggcatcttctaagtatagccagtgtgatctgtgctgggttccttacatgtgtaagccaaaggttagctggaatcagctagatacttcagacctagaaaaagtcagccaggggctgggagatggctcagtaggtaacacacttgcaatgtaagacttgagtttggtctccccagaacccacataaaaaaccaagtgcagcagctcacacttgtaattccacagttgggaaagcaaagacaggaagatccctggtgcttgctgattagtcagtctagccaaatcagagatatccaggtacagtgagaggctgtactacaaaagttaacgtggagagtgactaaggagagatacccaacatcagcctctaacctccacacacatttacacacatacatgcaccatggcatacatgcgtgtaccccacacattgctcacatgtacacacaaaaaatataattttttcaaagaaatataaaatattttaaaaaccagaatggctagtccctatcttgaggaaattcaaagcacgtcaaaattttttggtatttctgctgattcatgatttgtgttactcctaagtgacctcttggtttcaaactagagtaattcagcaataagtaaatccttcatcctcttcctctacttagaagacacaagcaaaataaaatagatcccttcagccctagacatctgttgtcataacaactgtagttctgacaaaccatctaaaaagccagcaacgattttgaattgagcattagtcatctccctccttccgttgaagttcaacctttcaatgctgtaaccatttgccagtgacaatgccccaccatcaactgctttctctcaatattgactgttgactgctattcctcccccttacctccacatattctagaaaaactcagacttgaaaaccttggctatgcataacatcaaatcacaagaaaagagatcctagggtcagggacagaggggctactgagtaatatgagaataccagtctcacggttgccaactcctggcctttggcatgttataggttcaagaaaggggatttgaaatcattggacaataatctaagatatacccatgctttcatttatttattcttccaaataaaaatttcatcaggctggaccccacacctattcaggtttgaatgtaaaatgtctctcaccaccgaatgttttgaacagctggtccctggctggtagaactgttttggaggttgtggaaccgctgggatacaaggcctagctggtaacacagaacactgaggatggctttaagcttgtagcttgaccctgctctgcttaaagccaccccttctgctaccatgtcttcattgccccaatggtgtttatgtctcagtggtatctaaacccttcctctctgaaacttcctctttagggtattttgtcctaacaaagtagactgactaaaacacactccctgctctttgccctgataatagtgatgaggcaaatgaatcactcagactcagcatcaagaaatatgaagctggagaaagaaaggaccagccgaccctccacaagcatgtgccacatgccaaactccatactgtcaccggtaagggatgccaagggcctgctgtggagctattttctccacatcgaagcatcctgtcctacagagaagagagtggttcataagactgggagagttaacagaacttacatggctctagaagtcagaaagtcatggaactcaagaggccatttccagcattatattacagtaagcacatgctggagctgaggacactttcttcagctcagctgcccagaagttgggcaggaaccttcaggaatgcagctttcacaaattgtcacccccattcaagggtgcactttttagtgatgaagctgcccttaagtcatccaggctgtgtgagcaaccaatcaccctagctcctgtgagtaacccgatgaactccttggttctcagagccagataggtggcactatttgttttgtcacaggtgccctgtgagggataaagagacatttgctcacttctctcagtaacagtcatgcaatggttcttcatgcacgttcctggttttatagttgaaaacactaaaactgtctaaaacaaaagactcttccagtgttttgaggcagttggtgtgtcaaatcaacaccagggagactttcttggttcaccacattctaatagtctctgactcaagaaatgtctgagaagaaactccaagctttaagttttagagaacagtagagtgtttggggcaatttaagcaatgaagaggagtgctttctagaactttaacaatcatacacagtgagggacatccttcacaacacataaggtgaaacttcaaaagtcataccaagtgggggacatccttcacaacacacacatagtagaactttaacaatcataccaagtgaggaacctctctctctctctctctctctctctctctctctccctatgataaaacactctaatacatacagctttaatagagaaacagtttattcagctcacagtccatattgtggggatttcaggcaggaacttaaagctgtcagtcaaatccagcagtaagagacgaaacagaaatgagtgtgtgcatgcccagtactcagctcaccctgtctagtctactatatcccaggactcagctccaggggactgtgctgcccacagtgggcaggtctccttacatcagtcacctaattatgactgtctcccacagacacgcatgcctacaggccaccctgatctagggaatctctcattgaggcttttttcctaggtaattttaggtatgtcacactgacagatgaaattaaccatcacacttcctttatcttttataaatatttataggatataatactaaaattgtattttaggggcaggaattatgacatctttagatctataatttttacaatttcttttttgttattttggttttttgagacagaatttctcccgtagaactggctgtcctggaactcactctgtagaccaggttggcttcgaactcagatatctgcctgcctctgcttcctgagtgctggaattaaaaacatgtaccaatcaccgcctggcaatttttacaattcttaagatagcaataacattaatccaatgtacacaaaacatgctcttatgtttagacatacttttagcaaaactataaaaagatattatctccacttcagataaggaaactgagattctagattattctttaaaatcaagcaaacagtaaataatagggtcaaaatctgaaataatgtctttctaagcatatgctcacaaaattgtgctttgctacatcacacactatacttagcacgaattgttgagcaataaagtcattgttaactcgagttgaaaatcagagctatttaataaataggcaaaaaaaaaaacccaagcataaagctatcaacttccaaaataagataaattcagtccttgttatttctggtgtgtttatcttatttcttcagtctaaggaagagtgcctgggtcctgagtcctggcatacatcatccagtatcatcaagagagacttttagaaaagtgttgtgaacactaattattagggaaatttttattattgatattatccaaggtccataaacacatctggcctttccattgtttactgttgttcgttcttttgcagtgactgttaatccaggtcatgatagagtaccattcgagggtgaactcagaaacaagaatacagagagctgaatggcctcctccatcactaatgaggatgccccaattgtcctcaagtcacacagctaatggagttttcaatacatttcccatctttgagcagctaaagcctttctcttgtcccatccctgccaaggcctgtaccctaagctgcaggctattctctctctgcatttgccacagacactgctgacttcatcagcaactgagaaccagagcacaggtcaaaacaggcaggctggctttgaacttgacttccgtataacactgcagactccacaattttcagacatttcaatttcctgattcaggggtttagtaactgatttaagcagtagaggagaggcctctggcaaaggcagggagtagaagaaaggggaggagtttttctgggatactggggagtttctgcccttgggatggtctagatttccaatgactgtccacccacacagtcggttccccccttcctggtatcctcataatgccaccttgtatttcatcactaaaatgccaagaggtggaccagtggggtaaaggacagggaagtaaccttggtattaatggattttcctaccagcatgctacttctacaataaagcaagagggtcttggaaaagaactccactcaagttggaagagaaaggagaaggaacagaaggggtgaggaagaatagaactaaaagggcatgaaggcagagaagaaaacaatgaagcctaagttcctctttgaacacatattctatgtcaatgacctctgggtgagattgacaatgccgaaaatgtaaccccaaaggcagtggccctgcaatctagtgcaaaagtacagtatcaccaaggccctgacagccagctcctattcagcctttgtaaccaactttacaggccatttcatgtctgcaaactttggtgtcgatctattatatgagatgggagaactaggttttataaggtcacataattgcgttttgtgaaaagtataaagtctaaaaaaatttaaactgcaagggcatagatagaaggcagacaatgtcttacatttgccaccttcatacaactccccagccaccatcacacagggcttaaagggctccaaagaggagtctgaaagcgcctccctagtctgatggtctgtgacagcctaccagcccatcctctgtggtcaacaacctgggtcttacactcaatggagagctcttgtctaagggtgtgttcagagaagctttttgtccagcctcaaccaatttagaaaccaccctggcaaagaaggaaattaggaaatggaccagaaggcaaaagtgtctgtctgtgtctgagatactagaataggcgctccattcgggccctgtggagtcatcatccagaccacacagtgggcgtggtttgttcctctctgtggatactaatgacgttattttagatgtggtctgtgagtatcttacagggatgaataagacaagcaaaccccaaggaaatcaacatctgctaagtggactcatccatcctgagtggtgaaatatctctgggcacaccttggctgagcatgagagtgtgtgtctgtgcagatagttcctgctgcatccctcatggtctctactctgtatctcctcttcccttttgctattgtctccaaataaattctagaaaattctcaaaatatttaacaaacacccaccccaagcacatccttacagagaagctcaaacatgtctacagccaacccttccctgctgtcctgatgaaagtcaccaccatgcctcactccctagaatcagcttatagggatgctcatttgccaccagtggcatccttgtctcctcagcaatgctaaaccaccatggacgcagggagattttgtgtttttctgagccctgtagtctgcatccaacagcagttgctttctcattttctcattgtgaaaactttaacttattctaaattattctgatctgcttcatcctataactagatattaatatctacatcacaagcatgacaatcaaatgaaaagtaaggtatctgaagcatctaggacagtgcctagcctagagcagctgtgagaacctttaaggtaaattacagaaacattaaataatgcctgaggatacatgggaaatttgctgaatggatacttgaaatctattttccctgaccaatatctttattttctcgtgaaagagagattttgggtatgatgtaaagagtaagacagaagacacagtgtgattagtcagaagtacctaggaagataatcatagcagaactacacaggggaacactcttaaggtttggctggagaaagcaagcatatcctggggagagaaaacagccttgaacttactacggcacagatccactgttcttgaatgccaggtgcttgctgttgatctggaaagtgatggagaaaccatgaatgttgtggttaatgacacagaggtctgtctcaagttcagaaatggtgttaggcattgtctaatccagtccctgtttcctgaacccaatatccccttgtattttgttgagtgtacctgtagagtccatgttttctagacatacatctccttccattctcatgagtgtagatgaatcttctaacactatgcagacattctcactctcaaaaaggacaacactgttctgccatgaattcaccagagaggacatttaatggattgtcctgtcaattccctccaatcacaggtccagaatgagcaaagccttaagtgatttgataggatagtatgtaggcctgagttctcattaccaatgaagatgccagtagctgtgagctctgtgacccccatctctgggggtcagctgccctgctggcctcaagaatcttaggagcttatctgttaaagcagctctagagaaactgtgtcccctcaccactaatggtttagagacaaggcaatgatttagaatgatccctaggccattttaaatggtccctagagggaaggcacagtgaactcaagaaatgacgaaattcagaagaccagatgtgagaggctcggtgagatgtgccatcagctagaggatacactgcagtagttagcagggtggtctggcttctgaatcatatgtccttagcactatctcaacagaaacggggaaaatgcccggtgagcttgtcaaggactgtcaagcctcacgcacaactaaatcaatgcaattaaaaggataatggcacacttttaaaacctatcagattggcaaattctcacttgatgatactcatgatgcaaggatgtcagccaagggtcattttcatacactttccatgaaatataacttgatatacccttctggaagatgattcaatgttacctgtcataattaaacaggcatgtgcctatgtacctagtaacttgcttgctagtaactgccctaaagtacagttgtatttgcaagagtctgtctgcacgtatgtgttggcgtatttctggccatagtttatagaagaataacagtagaggcaagtggaacatctgacaatatggaactagttaaacaaattgtagtgcacccatgacataaaattcatggaccaaagagaggggttgaggggtcaggggagagactatggtggctaaaagcagtgtagaagaggggagggtttacagaaagagaatgactgggaagaagctgcagttctccacaagtacttaggggatccacatatgtgtgtgtgaggacaccagccaaggctgggggtagaaccatctgaaaggatgagagaatacactacataatactcacaaagggctggagacaatacctgttccaaccatgaacttgactggaaatcatgcaactcagacaacactggtagaatgttcagaagacacttgaagccggggcatttacccaacactaaatgtagctttggttccacctaacaatctctaaaaaaagattgtaggtaacttgattgcacccatagataacaagtgttacaaaagtaacaaaatacacagcacctgttaaggtgaaagtcacaatgtctgacatttattggtggagtgctgaggagtttgtatgtggtacagtgatgagagtagctgctgagtacccggcactcaaaatgcaggagactataattcaggagagaaatcaatcgactgtgacagatgctgagctggaagagattctagaacaagcaggacacagctataaatcagtgagtacagagacgtgttagccataatcaaaaccagaataagcaaacagggcagaacaatgggactgaatgtacacagcaaatgaaaacttgaaccagtgtgctgctttgcccagctgtttggaagggtcctccaaccaggtattccagtgtcagaggacaactttcaaaatccattctctttctaccatgtgggtcacagctattgagctcagattgtcaggcttggtgaatggtacctttcccattaagccaactctctggtctctagaagagagttttaagtgagttataccatacaagtgggttacaaacaaaaactaataattattaaactaggaactgaggtagaagccacagaagatgcttatgttctcatccaaggggggaacctgatgcagaagggccatgtggtctggaggctcacatcagtggacccaggatagcaacacatggctatggctactccagctgcagtgtgggtgtagataatttgatagtgtcttctttggacgttgtattctttcattttcatgtcaaagttgtcaaaaggaacccatatgtccatttctgcttctgttatttgggccttcttgtgtagtgatatacgtttaggactattacttcaccttggaattaattccaatattgttgcactttttcccctagaaatttcctctgctttgagatctattttatctgttattattatagccattctaaaatttaatattagcagtgtgtatccctttccatcccttaactttaaatgtttctatgccattgtgagtgcagtgagtttcttgcagacagcacatagttgataatcatttaaaatttctcctgtcaatatctgttatcatttaatcagtatttgatatatttatatttaatcagtgtttaaattattgatagtttagggcttacacttcttctgtttttcattcttctctttctcggtctcttcacacctatcaggttacttgaatttttattagaaatatatattttattcatgctgttcttacctatatttttcagcaacatgtttaaattttacatccacataagtaaatttatttttcttaagcgtgtgtgtgtgcgtgcgctcgctcgcgctcatggaggaccaaagaggatgtcatattctttggaactggagttataggcagttatgagcaacccaacatgggttctggaatcaaacttgggtcctctggaggagtaagaagcactcttaaccttgagctatctctctaacccctctacacatattttaaatagaatattatcaactatttctctaattgttggacttcaagacagatgctcttcttttattctggtcattagctatgacttgagaaagtcatgaagagtgatagtcttttagatttaccacaaatttatcagttctactctttttcttcctgaagtctcgggccttccgctggcctttcttttctgggattagaatttcttctagccaatatttaactgtatgactgctggtaataatttttcttagttttcctttctctgagaatttcttcttcatacataaagaatagttccccagatacagtgcatgggaatcagtgtcacagttatcctgtctgactcagagagagcagttaattaagagcagtgaacatagtgtcagaatcaaaggtggtgggttccaatctaggcagataacctgcaacaagttattagtgaaactgtgcaaagagctggactttatggggaaatccactgttgttgcttaattattgtgtcagtgtgaatgtgttgttaatgtgtcaatgacagagagctccttagtagcctgggaacactgtgaggagcaaagatcagttagtggtggcgcatacaaaaacacagcacagcattttgtaccagatgtaagcattcaagagcttctagctctccctaatactgtaggcacagatatgaaccctggtactgacttcttagggcttgaaaggttttgatgaggtgatgcataaacacatcttgcagtgactggcatatgaaaagcattcaaataacattttattcaccttcccctcttctcttctttctaagtgtcttaactagacacataaaggcccatttcacagagctgctgcaaggactggatgtaactattacactagagcttctgcagtttgaggcaagctgaccaaatgtcagttatcttacagcgagcgctgggcccgtccccactccaccctgtttgcacaggcttctcagagtacctgataaattgttataatgacaaacagttgcctgggagctgaaagcagaaacaaataagcctgagaaccagaacatgagacgagtaagtatttaaatgcaacctacacttgttgatgtacattttctctactccagagatcctccttctttcattcatcaaaagatggaccaggcctttggagactggtagaggagggatcagaactcagtagatgtctcccgaggttcctctgagacagtcactcctcaccctgcagtgcttgggtttggcccatcctctctgggaactatgaaaactggcatgtgacaggacagctgttgtggtgaaaggaacttaagatactcctagtcgtgcccattcttgtcctctccaaagcagccatataaaaggtgtgagcagggaggaagaaaggagtgcagacagtcatgacagtggaggagagccacctaagccagggggaaatgaccctatctgcaaatggagtaaagggggcagtgctgagagagctttgtggcccgaggcccagcagagtgctttagtacttcagttgcttctggcttccagatgtgtatcacaattggacttttctaaggaccttggccccaagtattagatctgatcaccctgcctttgaaagcacttccttttgtctttgtaagtagctagctcatttgactgtgcacctacagtgtacctggtgctatgacagatgtgctgagaagaagggatttggggaaaaattgaagtctttgccttccaacaagaacaatgtcttgaggaacttgttcttatgtgtgaaaaggttgtcagcttgtctttctcccatgcagatgttttagcacacaggggacttccaaggggggggggtgacagcccttcgacctggagattccaagtaagtccaagcaacaaaggacagagtgtcctaggacagaagatgatagaatctgaggctttggaagtggcaggtggaccagacttcatagagtcaaaagaagcacgagaggaggagaaaataggtgctggagcccactgcagggacttagggtatctcattagggttctgggatcatcagacttcatcagagaagagcactgaagtgttgagaatgagggagtggccatttcaaacacagtgttaggaaaatctcctctacaggggccgattagctgaaggaatgaggggtgctgcttaaggaactgtccgttatttccagaagagagctggaatcagcatggtggtgtcagtaaagatagggcctatccaagcccgatgctggcagttaagactcagataagagaacaaaggcaccgataacaggtttagaaatacatggccctcagcagagtggtagggattggacagaaggatggaaatcagttgagtgggctaggctgtgtagagggttcttggctcgatcattagcattgcctttcttcccaggggatatagacaaggtatttattcttcccaaatctctgttcttccataaaacaaaggtcagtacacacctcaaagggaggtcgtgggggttaggtgagaaaagaaatatgaacgatctagctgagtggtgggtccactgtggaagctcagtagctgggaatgccctttgcctcttttctgccccagtccagcaaggagcaggcacacagcttcactgtaatgtttcctttcctcacctgtcacagctgatcggtcaccatgcttagagtcgcagggcagtgttttgtgtatctgcctcttgttcttaaatggtccctgactggaaaaaggcaaagcaaatggctttaccaaagaagtttaagaccactgagggtgtgaacttcagggtgggaaaaaaatgcctccaaagcattttctaaaaattcttttggacatttatgttgaaaatgttccacctcagattgatggagaagatacacaaagctgaacttgcaataaggtgttagtggagcgggaagggctttctcgtgagtcagcagaaagggccacggaagtaggatatgaaacagtccttccaataaagccttatgggttaggagagaagaaagcaagtgcacaatggataccgattacaattcatttcaattaaaaaataatttgaacaggagtagaatgatgcaaaaatgtgaatgcactatctgaaatgtggtaaaagcataatcattttcctgcgagtcctggcatacatcatccagtatcatcaagagagacttttagaaaagtgttgtgaacactaattattagggaaatgcttctcatctcggtgaaaacaattggggagtggattagggaacacgtgaccttccagagaaaggttctgcaaagaagacacccttttacagaacaatagcctatccatacctgaggtgtctacaattagccaccctttaccaaagactactttgattgttccatgcttttttccatggcttcaccgcttccaggctaccgagtgctgagtggtgctgctgaagatcgcttgtcttctgcttcccatctccattgcctgacccacatgggttctctctcctgggtatgtggaaaagccagcatctcctgcctatttctgcttcctgcactactctgcttcagggaatgctttgctagtattctccaactccaacaggacactgccttggaatatgtttggcctcctacaatctacagaatactcctcatcggagactgaatagcttggctgtgatctgcacacttactgctaagtttctttgttgtcttatatctagatcatacgatttacagtttccagagtgagacctttccctctaaggaagcctggatttgtcctctggtctcctgcacacttgtatctttgcacatatgtttgcacacacatttgcgtctgtacacatgtacacccacacacaaccataacatgtgtacacacaaatacaagtaaggcttttcctttgtatcacgatgtcagttttcattcagttccatgttctaggcagtctctaccattcgtcccttctcctaaatgagtaaaatgccacacaggaccctaggcaggctgctggactagaagaggtaaccagactaagttggatagctcagcatggctctgatcccaagagctttgctgatggctgtgatgtggcacaggcaaaatgatgtcagagaagattggtatttttactttaatttcctgttcagtaaggattttttcatagagtctagcatgtatcatgtggtgataaatacttatgcttcaattcaaataccctgaatttattccttttgttgaaaggcaacagaagtagtaattaagagcacagacttggagttgaaatcccaactctgccatttcctggtggtgtgaccttggccaactaatttagtctccatccttcaattcccttttctataaaattggactattactaattccattaaattgatatgagagttcaatttgttatccatagcatttagaacattgccaggaacatgtaaacatcatgtaagggttggctattttcagtgtttcatgcagctacataattgtattaatcctcatcctgaggtccaaggtaggatgctggaaataaggaacttcaatgccattttacagatgaggactcagaagttcatggttgtagtggccatgcagagctaggagctgcgtatcggctcacacccccaaagcagaaggagcgttaccaccactttaacaggaactcctgttgtttgcacaagctggagagtcagctaactgttcctgcaaaagctagcctggggacttgcttctctgcttcatccaaggctcacctgtcccctactgtaaggagcagctacagtgccatgaaataatgacttcaagcccacacaggactcaggtggttaatatcagtaaattctacatttttctctcaaattcaactggctctaagccctggtgaaggatgggatgtgtcctctgactggtggacattgatcacatgaaccttttttcagttgtcccctgtaaacgtgtgtgtgtgtgtgtgtgtgtgtgtgtgtgtgtgtgtgtgtgtgtgtgtgcttgtagaagctggggactgatgctgtgtgtcttctttaatctttctccgctgtatttcttgagacatgatctctcactgaccccacagcttaacagtttggctagaccagctaaatagcaaccccacaagatcttccttttctttcagcttccccggtgctaggatcacccgagtcacctctgactctggatatggatgctggagtctgtcctctggtccttgtgcctgtgcagcaagcattctccacctgagccatctccctgcatgccttaaagtcagcaccataaatgatgggaatgacaggtctgaccctgcctgtgctgtttcccagggatgattcccacgacagcttatctcccagctccagctgtgcttggcatcccagctcccacaaactcctctgcctcacaataggacaatgtgcttggcactggagtagaaactcgacctactgtttggttcacctttgctagttccaaccagaaaatattcataaaatgaaagtagattaaactggtttagcctagtcatgtggacagacctgtcaggcagcctggttctggacagtccacttggggacaggtagtcattttgtgtatgtggtggtttccatcaggaccatgtgaagggtgcctcccaggtgtggagaacacatcagctgtgaaatgtgttctcatatcagaagattccacttaaatgggttttaatttgttggcattcaactagaaaggctcaaaagaagcctttaaaagaggcacaggccttagctctccacaaaataaacgaaacgctgagcataatactgatgtttacaaagtatgcattattatgatgagctgatatgttcattattgtcctttgaaacaggcaagcagattttgccagcaaccagatgtgagccattaataaactgaagaatgaactcaatgcaaagcttgcaacctgtctatcatccgagcaacccacatgcctgtgagaagataacccagtacctcactcataacataatcacaccacacacatcctggctgctcaaagtgttccataataaccatttaaattcaggtttgcacattatgtgggctgttctactgacgcagggctaagtgttctaagtcttgtgagatgacccatcttgctaaactctttggttagacttgcccgatgtattattattaagccccatgtattattattaatactatcatctactcactgtgtaagcaccacagagtgactttaagggtgtaattccatgaaatctgcaaacttggagttgaggtctgattctactgcctagcatctataccttgtcaaatgtgtccctttgtcagctgggcacacgatgcagaggaggaagcttcaatttagcttgagacatctccattgtactcagggtgtttcctcacacacagtgatggtcagcaggcaacaccctggaagctggagagacagcttcatcaaaaaggaagaatctgtgactccatagcactggttgctactgagatgggagaaacctgacttagaagaaacgttacattttatgctttaaaaatagatgatcatgataaatatttagtaatctgtaaaatccttatggcaagagttaagctgcttctctttgacttgtcactgccattgactttacttacttactgcttcttccatgcatttttatagatggcattttatatgtaagatgcttgcaggctggagggagccgaactcctgcttggactggaccattctgtttgttccatttttctctctttctgttgtttgacaacctaggaattcttccttgggagacattcccctcattctttacaaaccaccccactgtcctgctagttgctctctctaattttggaaatggagtcatttagtcatttcagtccaggccttgagccctagttccaaattaaaccctaacacagctgccaagggtcatttttctcattagaaaagtggccttcagggagtttccgtttggttcagtgtgacctctaagtcaccagcttgtcctgagaggggtagcagagccagcttctgtctctaggtaggatttggactgtgccttatgcaataagctcaggagattggctcttccaggtgctttccagggctctaaggttctggaggctgcacctagcaccccgggaagtacaattggctgtttaggaaaaaggataagttggtggtcagatgttttggggcttgggaagacagttgtagaactggtgatatttaaagtggatcttaactttagaaacagaatttacagtttacaaaagagatagaaaaatgaatctatccccccctacccaaaacttatcagctatcctttcaatacaatgactgatccaaattctaattccaggacattttaataaaaaaaaaactccacaatttaaaaacaacagtaaatagaaaaggaagaagaggaaggggtgtggtttactgggacaaacagaatccgatgacaaagggagatgtggcttcagttccacattatcatggctttgcctgcctttgtatgcagggtctcaaaacatcagagaaggaaaataatgatggaagcaaatgctttagtgtttaatttttgtatgcctgatctctaaacacattttatacctcttcatggtaaccctgtgtggtaagctctggtgggttcttcattttataaacgagcaactatgttgtagaaagcactgtcagaggttacagacccagagacggaactgagtctgtcttctggcctgttactgtctagaacccaggggcttttcattgctatctctgttatacagcaaaggggcaagaggggataacttgtagagagaggtgtgagagagacttgtcccagtgtcagctcagggaagctttctggtccaagctgtctgtttttaagccaacagcaaaagcataggatcccttacatcctacccctacccatattaaccttctggacaagcctctaggtcccacagatgacatgaaagaaaaaattctaggaacagtgcaccctgtggcctgtgggcacctaggttttggtagggaaattccagccatctggtttctggcaagacttactgaagacaagttagtcaaaatgccagcaaaacagaaacttccttcaaccaccctagaagcagcaaatgccacttttgcttgtaggtggtttcctgtgatgaaagggagactacagtgctttgcactggccaaacaggttcataaattcttacccaaaaatcagccaagtcaccacagtggtggagagtagctgacaagctcatagagcccaccttttgagatttaggcccttgtggagagcacacagcacaggacaaatgctctgtcttgagtcccgggttgtgttggggctttctcgctctctgttcctctgcaggaagccagctgctgtgctgtgaggcggctctggggacatggatatgtctgtgtacatgactctgaagaagaccaggagaagcctgccagcaaccagaggagtggacccagagtctggtgctccaccagtggggctgctgcctattatggcttgggtatacagtgtcccccacagcctcatgtatttgaacatgggcacccacctgatgacatggttttaggaggtaaggtgtcccgcgcgctctgtatttctcgccagcaagaaatcatacacgggacactcggatccttctgcaggaaagctttaatacatcttgtgaggggagagcataagcttaccagagcggagaccctgagctaagaatcccgtcccctaataaaggctggcagccgccgcctgggacgtgttaccctatgattggctgtagctcatccggccatatgacgccacggaataggcagagatcaaggaatggaaaattacccagcgcctgcgcaataatcttgtttacattcggtgcctgccggatgcaggcgccatcttgtaatggagaatgcaggnnnnnnnnnnnnnnnnnnnnnnnnnnnnnnnnnnnnnnnnnnnnnnnnnnnnnnnnnnnnnnnnnnnnnnnnnnnnnnnnnnnnnnnnnnnnnnnnnnnnnnnnnnnnnnnnnnnnnnnnnnnnnnnnnnnnnnnnnnnnnnnnnnnnnnnnnnnnnnnnnnnnnnnnnnnnnnnnnnnnnnnnnnnnnnnnnnnnnnnnnnnnnnnnnnnnnnnnnnnnnnnnnnnnnnnnnnnnnnnnnnnnnnnnnnnnnnnnnnnnnnnnnnnnnnnnnnnnnnnnnnnnnnnnnnnnnnnnnnnnnnnnnnnnnnnnnnnnnnnnnnnnnnnnnnnnnnnnnnnnnnnnnnnnnnnnnnnnnnnnnnnnnnnnnnnnnnnnnnnnnnnnnnnnnnnnnnnnnnnnnnnnnnnnnnnnnnnnnnnnnnnnnnnnnnnnnnnnnnnnnnnnnnnnnnnnnnnnnnnnnnnnnnnnnnnnnnnnnnnnnnnnnnnnnnnnnnnnnnnnnnnnnnnnnnnnnnnnnnnnnnnnnnnnnnnnnnnnnnnnnnnnnnnnnnnnnnnnnnnnnnnnnnnnnnnnnnnnnnnnnnnnnnnnnnnnnnnnnnnnnnnnnnnnnnnnnnnnnnnnnnnnnnnnnnnnnnnnnnnnnnnnnnnnnnnnnnnnnnnnnnnnnnnnnnnnnnnnnnnnnnnnnnnnnnnnnnnnnnnnnnnnnnnnnnnnnnnnnnnnnnnnnnnnnnnnnnnnnnnnnnnnnnnnnnnnnnnnnnnnnnnnnnnnnnnnnnnnnnnnnnnnnnnnnnnnnnnnnnnnnnnnnnnnnnnnnnnnnnnnnnnnnnnnnnnnnnnnnnnnnnnnnnnnnnnnnnnnnnnnnnnnnnnnnnnnnnnnnnnnnnnnnnnnnnnnnnnnnnnnnnnnnnnnnnnnnnnnnnnnnnnnnnnnnnnnnnnnnnnnnnnnnnnnnnnnnnnnnnnnnnnnnnnnnnnnnnnnnnnnnnnnnnnnnnnnnnnnnnnnnnnnnnnnnnnnnnnnnnnnnnnnnnnnnnnnnnnnnnnnnnnnnnnnnnnnnnnnnnnnnnnnnnnnnnnnnnnnnnnnnnnnnnnnnnnnnnnnnnnnnnnnnnnnnnnnnnnnnnnnnnnnnnnnnnnnnnnnnnnnnnnnnnnnnnnnnnnnnnnnnnnnnnnnnnnnnnnnnnnnnnnnnnnnnnnnnnnnnnnnnnnnnnnnnnnnnnnnnnnnnnnnnnnnnnnnnnnnnnnnnnnnnnnnnnnnnnnnnnnnnnnnnnnnnnnnnnnnnnnnnnnnnnnnnnnnnnnnnnnnnnnnnnnnnnnnnnnnnnnnnnnnnnnnnnnnnnnnnnnnnnnnnnnnnnnnnnnnnnnnnnnnnnnnnnnnnnnnnnnnnnnnnnnnnnnnnnnnnnnnnnnnnnnnnnnnnnnnnnnnnnnnnnnnnnnnnnnnnnnnnnnnnnnnnnnnnnnnnnnnnnnnnnnnnnnnnnnnnnnnnnnnnnnnnnnnnnnnnnnnnnnnnnnnnnnnnnnnnnnnnnnnnnnnnnnnnnnnnnnnnnnnnnnnnnnnnnnnnnnnnnnnnnnnnnnnnnnnnnnnnnnnnnnnnnnnnnnnnnnnnnnnnnnnnnnnnnnnnnnnnnnnnnnnnnnnnnnnnnnnnnnnnnnnnnnnnnnnnnnnnnnnnnnnnnnnnnnnnnnnnnnnnnnnnnnnnnnnnnnnnnnnnnnnnnnnnnnnnnnnnnnnnnnnnnnnnnnnnnnnnnnnnnnnnnnnnnnnnnnnnnnnnnnnnnnnnnnnnnnnnnnnnnnnnnnnnnnnnnnnnnnnnnnnnnnnnnnnnnnnnnnnnnnnnnnnnnnnnnnnnnnnnnnnnnnnnnnnnnnnnnnnnnnnnnnnnnnnnnnnnnnnnnnnnnnnnnnnnnnnnnnnnnnnnnnnnnnnnnnnnnnnnnnnnnnnnnnnnnnnnnnnnnnnnnnnnnnnnnnnnnnnnnnnnnnnnnnnnnnnnnnnnnnnnnnnnnnnnnnnnnnnnnnnnnnnnnnnnnnnnnnnnnnnnnnnnnnnnnnnnnnnnnnnnnnnnnnnnnnnnnnnnnnnnnnnnnnnnnnnnnnnnnnnnnnnnnnnnnnnnnnnnnnnnnnnnnnnnnnnnnnnnnnnnnnnnnnnnnnnnnnnnnnnnnnnnnnnnnnnnnnnnnnnnnnnnnnnnnnnnnnnnnnnnnnnnnnnnnnnnnnnnnnnnnnnnnnnnnnnnnnnnnnnnnnnnnnnnnnnnnnnnnnnnnnnnnnnnnnnnnnnnnnnnnnnnnnnnnnnnnnnnnnnnnnnnnnnnnnnntccggccctatgacgccacggaataggcagagatcaaggaatggaaaattacccagcgcctgcgcaataatcttgtttacattcggtgcctgccggatgcaggcgccatcttgtaatggagaatgcagggacggctccctacagtaaggtctagctgaagaatttgggacaagagggacaaatctgaagacatagacaagccccatttctggtcttctctgcctcatgtttgccaaaatgtgaagaggtaaagagtcccaacagtatgttcccactgccatgcagctatctgcctgccaccctgatggactgtatctcttcaaactgtaattcaaaataaatatcccccactttaagttccttgttgggtagctgacctagcaacaagcaaagtaaaaattaaccaaagcacagataacatgtctcaccaaagccccatgacaggcagcctttgagccagaggcacccagctaagccacagctgaatatccactccacaaagtgtgtattgcttgacagatattgttcagtggaaaaatttttattcagtggataagtaatataatactaaagtgggaagaaatatctggtaagaatagagacagatagcacactgagtttaacattcagcaaaactttccctgtcaacttctaagaatcccccatactaggttgtgtaccactggctacatcacaagacttatccgattcttgtctatgaccaggctttgtactacctgagttctagagtaaaaaatgctcacatattctgtccctttgtatgcaagaactgagactcaatggaagcaaattctccaagaccactgctagtcagtggcagtccgctcctagctgtcaactactagtagtaactactgaaaacataccagttttttgaccgaggctatgcaacccttcccaaggctccatgttccctctagaggtgctgtgaatatgcatctatatttaaaaatcaaatataaatctggagcctggggtttgttcctactacccctcttttctccacaaacccatctctaactgaccaccaaagcctactgacactactttattttttatttttttgtgaccagttttcttcgctccatttttatttaaattagaaacaagattatttttcatgtcaatcccagttacctctgctcccccctcccctgccccacaactaacaccctgcctatcccataccctttctgaccctcagggaaggtgatgccttccatagggggtcttcagagtttgtcatatcctgtgggatagggcctaggcccacccctgtgtatctaggttcagggagtatctctctctgtgaaatgggctcccaaagtccattcctatgctagggataagtactgatctgctacaaaaggccccatagatttccaaagtctcctcactgacacccacgttcatggggtctggatcagttcccagtgatcagtctgggaaccaagagctccccttgttcagtgggtttcaccaacctggtctggacccctttgctcatcactcctccttctctgcaactggattcaagttcagttcagctgacactactttaaaaacatccacttctctccagctccatcgtctgctgattagaacaaccgaaagaggttaagctaggctttgggagcaatctcatccctagatttcagtgtcttgacataaagaaagcttttttctcacttatatcacaagtaaggcatgccttcttcttctttgaacttttctgtctggtcctcaggcttactgagcaagcaaggggatggcagaggccactcatctctaactgaagtgatgtccatcagctccacttgtacgccattggctgtaactagctgcataaagcaaatcaactacaggttatactgggcatgtcagtttctcgacagctgtaacaaaatacttgacagacacaactgaaaggaggaagcagttactttggttcatggctcgtgtgagaagttacttatctcagagtggggacaaagcagaggaatcaggaaaggggtctgaagacaggtgtaacattcattcaaaagtattccccaggcgcctaccccaccccacacaccagatcccacctctgaaactttccatcaccttctcaaatgtggccaccagctgggaccaagccttaaacacatgatgttcccaaggacattccacattcaaactgcaacactggaagacaaagagggcaatcggagtaccgagcaccctagcccgtcccccacaacggaactaacacagtaacctttctcagattctttgatgacatccacccaccacttacctcttctctccagaaatgtctttgctgaggatctgaagggtctctttaggatgtattcttaggatgcccacttggcctgaccctgtgtagctctggactggtctggcctcatcttcctttctcataacccactgctttcttcagcatagccacccaagtcttcccgttcctctggctcctttcctccttttacagaccactcaacaaaggcaggtctctctcacctcaaagtctgaaaaaggtcatacattaatctctgaattttgagtaatctaatcttagattattactggttcagcaaactagtggtgtgacagataggaacaaaacaaagtagaagaggatggatgttgtagcctgtggcctatctcgcttctcagaggaggtgtggaagttatatcctctgtgttgctactcctggaggaagatggcttcagtacacggtttgtttctgtgctgccaagtttcctcatgagctttgcatatcttcttgtttctttccagaatattcatcactctaccacacaccttatttcttggttctctgtgacagtcctggtatcccttcccttcctaacactgtcagacttgccattttatagttgtctgtgaaattttacccttgcccatcattttcactaaattgtaaatactggagaggtttgctcatagcagatgagcttcccaaatgtggcagatctcagcaagaaaatggagacaccagaagggagcagtgttcccctttccccttttgtttttccttctttgagttcataacacataaaaatgatgttcttaaaattaaaatccccgctctctcttctccagccgagcaagatgcccaagggaaaaaaggccaaggggaaggcccccgccgtcatgaagaaacaggaggccaagaaggtggtgaaccctttgtttgagaaaaggcctaagaacttcggcattgggcaggacatccagcccaaacatacttcgtcaaatggtcccgatacattcggctgcagcggcaaagggccatcctctataagcggcttaaagttcctcctgccattaaccagttcacccaggccctggaccggcaaactgctacccagctgctcaagcttgcccacaagtacaggccagagacaaagcagaagaagcaaaggctgttgtcccatgctgagaagaaggctgctgccaaaggggatgtcccaactaagaggccacctgttcttcgagcaggagtcaatacagtcaccacttggtggagaacaagaaagctcagctggtggtaatcacccacaatgtagaccccattgagctggtggtcttcctgcctgccctttgtcggaagatcggggtcccctactgcatcatcaagggaaaagccaggctgggacgactggtccacaggaaaacatgtaccaccgttgccttcacacaggttaactaagaagacaagggtgctctggctaagctggtggaagctattaggaccaattacaatgacagatatgatgagatccgctgccacttgggaggcaatgtcctgggtcctaaatctgtggctcgaattgtcaagctggaaacggcaaaggccaaagaactcgctactaaactggttaaatgtacactcactgctaagttttctgtacataaatacaaacttatcttccaaaaaaaattaaaatcccatctctcctttgctgttagaatcccatcacccaggagacagcaaatgtccatgtcctgtttgctctgtggatggtgaacttgatggtcatcccatagaagtaacttgcatcaggcagtcccatatccacttctcaaactggggtgcacacacagcttatgcacaagaaatacccacatgctaactgttcctcatgctagctctcatctccagtcccactctggtaccccacttccctctgtcaagaattcacttgcccctcctctctgactcatctattaagatttacctcatttcctaacctcttgagaaagccttctcaatctgcaaagccagggaagccaggtgtttccttgggccttcccaagctctcatcatctgtagacaacttttcatcactgtattctcacatggaatctttttaaagatttatttctttaaagggagggagaaaagagagagagagagagagagagagagagagagagagagagagagagagagatgcaaacatgtgtgaagctgtctctcagaggtcataaactgacattggattctctggagatgtagttacaaagggttatgagccactggtgggaattgaactctgatccttggagctatctctcaaactccaacatggaattataagtgcctgcatgtggtgctgtcagcttccatgccaacatacacagtcatatccttgtatcactcttctctatgtacacacacaaaaacacaaataaataaatatttttgaaatttttattcaacaaatgaaattctgtaaaccatacccttcctttattaatgcaaattacctgaagtttccacttggatttctgctccacaaggtactagactcacccccaccgagtaatagtacaatccagagaaggctgatgttcacagtgtcccatttccataagtgagagttttataaacagtcaaagaagctatcaaatggctaagactgtaaatcaatcaggcctccctctgccttctcctcctacagatcctgtttgttttcatcctgaatctcctcttcttcctcctctcttctgtctctcctttctctttcaaatcctcttccatctcttcctcctcttgcttctcttcctctcactccctcatctccccaatgaaacccctaagctctagtcttcattctcatctctcccttccctgctctctgtatctcaccttctccccctacctggaactttcctgagattcatctgcaatggatgtagtgacctaagggtaaaattttatgtgacttacactaattatgactcagatgctgcccttcttagcagacttgctgcagtacgtttctggagggaattattttaaaatttgttatgttctaaggtgagacaggtaacacaacaataacaatttctttcggcaacataaaatagtctccttgcaaaaatggagggcatttccattaagaagacctaggttttgatctagatactgatttgccctgacattgtcacttctacatctactcgtatggccagtctgtattccagcccttttcattcaagtgtaattatttgagtctgcaaattgaacaacagtgtcagctccacagggcagtgggggatctagggaagctatgggtgagggtttctccaagttatgtccttatataagaagtgtgtgtgtgtgtgtgtgtgtgtgtgtgtgtgtgtgtgtg

SEQ ID NO: 14 - DNA, 276587 bp, Cricetulus griseus
  source 1..276587: mol_type = other DNA; note = XP_003512331.2  Contig Sequence
  misc_difference 1..276587: note = N can be a, c, g, or t
cctttctccacatcctctccagcataaactgtcattgatgtttttgattctagccaatctgacaggagcgagatggtatcttagagttgtttttatttgcatttccctgatggctaaggatgttgagtaatttcttaagcatctttcagccactttagattcctctattgagaattgtctatttagttctgtaccccactttttaaatatttatttatttatcatgtatacagcatttgcttgcatatatctctgcaggccagaggagggcaccagatctcattattgatggttgtgagccaccatgtggatgctggaaattgaactcaggacctctggaagagtagccagtgctcttaagctgagttgtctctccagtccgtgtcactgcttttttaaatcacctgtttacttgcctgtaattagaggggaccatatcttcttaaacactgggaagccacagtgtgcagggtcaaagacatttgcagagtggtgatgttttaatattctgtgtcctttgccttagagaagcttctcagtgtcaggaggtcccatctattaattgtcaatatcagtgtctgttactgctgttatgttcaggaagtagtctcctgtgtcaattagttcaagactacttcccactttttcgtctaagaggttcagtgtggctggatttatgttgaggtctttgatctgtttggagttaagttttgtgcatggcgatagacatggatctatctgcagtcttctgtatgtcagcatccagttatgccagcaccagttgttgaagatggtttctttttttcattgtataattttagcttcattgtctatgcctctaaaccgaagaatagataaaggaaatgtggtacatttacacaatagagtactactcggcagtaaaaaacaatggaatcttgaaattcacagtcaaaaggatggaactagaggaaaccatcctgagtgtggtaacctagacacggaaagataaacattgtatgtactcactcataattgggtattagacatagagtaaaggattaccagcctacaatccacaaccccagaaaagctaggaaacaaggaggaccctaagagagacatacatggacccctcagagaaggggaaagggaaaagatctgagtaaattgggagcatgggggagggggaaggaagtaacagatggagtatgggagaaggggagggagaggagaacttgagcaatcaggaaggttgagtggggggggcagagaaggagagcaaggaaagagataccttaatagagggagccattataggcttaactagaaatcccaactaagaatctaagcaatagtggagaggctaccgtaaatgcctttcccctataatgagattgatgactgccttaaatgccatcctagagccttcctccagtagttgatggaagaagatgcagacacccacagttaaacactgagccaaactcctggaaaccaattgtagaaaaggaggagtgatgagcaaaggggtcaagaccaggctggtgaaacctacagaaacacctgacctgaacaaggaggagctcatggaccccagtctgacagctgggaaaacagcataggatcgaacaagggtctctgaatgtgggtgtcagttaggaggcctgggcagtctatggggcctcnnnnnnnnnnnnnnnnnnnnnnnnnnnnnnnnnnnnnnnnnnnnnnnnnntccctatggagggatactctctcatcctcactacacggaggagggactaggtcctgccccaaatgatgtgtcagactttgattccccatgggaggcctcactctctatgaggagtggatggggcatggtatgggggagtgggaggtgaaaataggaggacactagggagagggaactgggatttgtatgcaaaataagattgttttaatttaaataaaaattaatttaaaaaagaacccagcttacaaaacaaagactcagaagtcaaaaagagctaagcatgtatttctgtgacagagcttttacctcctacatgttaggccctagatttcatccccaattctttatatttttagtaggaataaaatatatatatatatatannnnnnnnnnnnnnnnnnnnnnnnnaacaagctcatggaaaatattaagtgagagcctatattaaccatcgtcattaggccagctgctgaaatccatatgatctcattgatctactcacaggcagaattaaccagtggttctcctctaagccattatttcatgagatgtgactcaagattcagaccactttgtggctcagctacctagaaccaagggctatcctgaggctagggaagaaaaagcattgggtgctctgcactgtgttaggcaaccaccaataacttctagaaaattccttcaagtgaagtaaaataaaaatggtgatacctggagagatggctcatcagtcaagagcatatactgctcttccagaggattccaatttactttccagtacccacatcaaatagttcaccacttcctgttaactccagtaccaggaaatctgataccctcttctggcctcttacaagcacatgttcacatgcagagccacagaaacacaaaaacagacacataataaattcaataataatttattatttacgaaaacacataattaaaaataaaataagtcttttaaaacttttttaattaaaaaatggtgaaagggccgggcgttggtggcacacacctttaatcccagcactcaggagacagaggcaggtggatctctgtgagttcaagaccagcctggtctacaagagcgagtgccaggataggctccaaaagccacagagaaaccctgtcttgaaaaaccaaaacaatggtgaaagagagctgagtataatctcagcatctgaaaagtggagggaagagaatcaggaattcaaggttagcgtcagctacaaagttatttttaagccagcccaaactccatgaacctttgcctcaaaaaaccaccaaaaagaccaaaacagaacctaatagtatgctgtacatatgtaatcccagcactgtggaagcacagggattgagagtttgagcctaacttgggatacattgtgagatatgtctcataaataaataaataaataaataaataaaccaaagctaaaattgtgaaaagtagagtcaaatctcagaaaatgatagaagaaaatgtagtggcttttgcttccaatcctgaaaacctgagtttgatactctggattcatatggtgaaaggagagaaacaattctacgtgcacactgtggcacacatgtccacactcatataaaaaataaatgttaaaaagtaaaaacagccaagtgttggtggcacatgcctttaatcccagcactcgggaggcagacgcaagaggatctctgtgagttcaaagtcagcctagtctccagagtgagttccaggatagcctccaaagctacagagaaaacctgtcttgaaaaaccaaacaataaaaaagtaaaaacaatgtagaataatgtcacaatgtgtgggtagcactatgataagatatacaactcagaaatcacacagcaatgattcagcaaatgtttgtataagactgtataacttctcaggagccaaaaatagcagtttcatctagagagactgaacaagggaagatactagcaatgttacacaccagaatgaatagccatagtttacatcgaacttcctcagggtgcaacaggtcccagatccagaagcccaaatagtcggataaatttaggaggaggtcatattcactgtggacaagaggaacgcaaaaccaaacaaactacagtaataccttacattctccaaaacagcaaaactggaaaactgggcaacatcaagagaaattctcccatgttgctggggcagcaatgactgtcatgcagtttgtggcaggccaagacccgaagcactaagagtgtataacacggagtagaaataatgaaatgtgccaggtccatgttactaacaactatgcagcaacagaaaactcgagtaattatgcattatggccagcagaaagaactcagaatccctgttggggatagagaaaaaccatgcacatatggaagaaaaaaatcaatctccaaattctaaaaagaatacacatacctaaggacagagggaaatcagcacagaacctttggaaagaagggcagttggagcaggaaggcaggaagaaggcaaatacataaagttattctccaatcctccatgttagtgaggctgcaggtaaatgtggtgcaatttggagtgggatggtgtcaaacaggggttttctccaagaggtaattctataatgtataaaatttcaaatgtagtttttttgttttatttgtctatttttatttgtttttgttttgagacacagtgtcactatgtagctgtggctagtctggaactcactatgtgaccaaactattctggaaaccacacacatctgcttgtcattgcctcatcatgagtgctgggattaaaggcatgtgttaccacacatgactggattttttttttcatttttgaggctgttttgttttacatttatttttctggatgggggtggctagagagatagcccagtgattaagagcatgtactgctctttcaggcaagcaaggtttagatcccatcacttgcatgacagttcacaagcaattgtaactccagttccaaaggacccaacacactattctggccttcttgagcacatacaaacatgcaagttgtatattacataaaaattaaataagtctaaatttttattgttattttatgtgtatgagtgtttggctgcatatatgtaattacactaccatgtggacgcctggagaccaaaagagggtgtccatgtaagcccttcaaagaatgaatggctagactctgcccccatacttctctaacaaccttaacggctggtcctggcccttcaagccacccggccctgcactacagaaaaaaagcccaacatcaggcatcaaaatccctccagtcccaggccaccctagaaaactctacccacccaccaaaataccccataaaagccagttctttgctgcttctcccctgagcagaggaagctaccctcccttctgtgtctttcccaataaatctcttgtgcagtgtgactttgttgtattccttggttcccatctaccagtccacctttcccttcagaactgtaacacctaacagtccagttccctggaaactcaagttacagtagttatgagctgctatgtggatgctggcatccaaactctggtaccctgaaagatcagtatatgctgttaaccactaagacatcactccagcccctattatttgtttttgagataggatctcaatatgtatccaaggctggacttgaactcctgatcttccaactttacattctgagggttaagattacacacatgcaacactacacccattttaaatgttcatgtttcccctgttaattctgcttagagctaattatcctagagagatagatacaccttcaaggctgttagttgcaataataaataatagctttctcttttcctctttttaaataaaaacataacagtcactgctcaaacaaactgtggttcacccaaatgtcaagtattgtgtacagcagtgaaagggagaattattggcaaaagcaacaactcctgaaatggtctcctgaaagcatcaggctaaataaaaaaaaaagactactgttgaaggttgcaggctatgtgggtactctgatggcaacaatcttccagtgactaaattcaagacccttaacaggaaacagcttacacactaggtcccatgaatttccaggaagaatagagtttataaaaagtcaacagaagaaacccttgtgctaaggaggcctgtgtaccgactggggtagtaaagagaacccatgtggtaagcccaacacaagcactttagacacttagtaggtattttttcttcttttggttttcagaggcagggtttcctggaactcactctgtagccctggctgtcctccaactcacaaatgcccccccagcctctgcctcccaagtgctgggactgaaggtatgggacatcacccacccaccgactagagtgttttcaaaaggcttgttttttgaattgctagggatggaacccaggtattgttaatactaggaagtgctctaatactgactacatccccagcccttcttaagagagtctgaagctgcactaaggtcacccaagaagcccaaagccgagccaattcgaggagccacgggtctcttgaatgtctctaggcagtttccagttaatctgtggtttatacatgcaatcacagctacatgagtagctgaggcatgaagaacgcaagtttgggacctgcctgaaacaaagtacgcgttcaaaatgagtcatgggcaggaccatgtccaaaaacagggtggtgggggggtgggatttgggaggttttgttggttttagcaagagatataaacagcaagcatctcaggtgcaatctccagaactaaacaaagaggaatgggaaatacactgaagccacatctgactgctcgtacctcaaaccctcaaagaaaatattcgtgattcgttgataaccacggaacacacaaccatccgtcacaagggggtggatttcctcggtggtcgtgatttctcattagtggagttagtcagcctccgacaaaggaaaagaacttccgataaagagcacagccattgaggtaaaggcggggtgggatcagagtatcttttggcaatgccttctgataaaacttgggcttatccattttgggggcgttagttccttccccagcgaaaaggacaagtacggaggggtcaggcggtggtggcacacgcctttaatcccagcactcaggaagcaggggcagtcagatctctgtgagtgcgagaccagcctggtctacaagagctagttccaggacagcctccagagccacagagaaaccctgtgtcgaaccaccccactcacccaaaaaaagtaccgaggggaaacctctgtggagggccaaggcgcagacaaccttgtggattgtggatcttctcattctctttcccctgagatgcaggcctcgaaggtcacagaatcatgcttgccaggaagtttggccaagtacccaatctgggtaaccatggaattacatcacaatgcctctggccatgacccagaactggtcccacaaccctcttgcaccaccaccacccatgaatctcatattcactggactcctctccttcccactgtgccctgttctccgagtgtccctgagcttgagcgggagaactaaccaacacgaaccactctccaagaagtaggcagagttggctggccaccatgtcacaacactggaggctattgtcagaggtgttatcacattcttgggtgggggggtactgaggtaacaaagacatgtcacatgaaaagtgtagctcaccagaaggggaatcttgttctgttgctagatcacttgtatcttggcctcattcagctggggtttttcagtccctggctctagtgtttcttggggtacacaagggaagtcctgtagagaaagcttgtgactttctacagggtctcatacaccagggtctccagaagctgatcccagtatgtccctgcccacaagtaggaccctagggtcttttggagacagtgtggccactcttggcacctacaagcagagcctctccagctgtctcaaatcaagggctctgctttggctacagatcaagttctacttgcacttaatttggcctgggactgcctgttgtgggctagtgttctgccccttgggcccctctcactgactgtggcagcctgatctcggagtcctctctggtatgggtgttgcagagaaaggacacacactggccctctgttgggcgatgaggagagggacacggagggcactgtcatacactgccctgtctctggtagtccttggcaggtaccatgactcaaactggtgccctctgtnnnnnnnnnnnnnnnnnnnnnnnnnnnnnnnnnnnnnnnnnnnnnnnnnnnnnnnnnnnnnnnnnnnnnnnnnnnnnnnnnnnnnnnnnnnnnnnnnnnnnnnnnnnnnnnnnnnnnnnnnnnnnnnnnnnnnnnnnnnnnnnnnnnnnnnnnnnnnnnnnnnnnnnnnnnnnnnnnnnnnnnnnnnnnnnnnnnnnnnnnnnnnnnnnnnnnnnnnnnnnnnnnnnnnnnnnnnnnnnnnnnnnnnnnnnnnnnnnnnnnnnnnnnnnnnnnnnnnnnnnnnnnnnnnnnnnnnnnnnnnnnnnnnnnnnnnnnnnnnnnnnnnnnnnnnnnnnnnnnnnnnnnnnnnnnnnnnnnnnnnnnnnnnnnnnnnnnnnnnnnnnnnnnnnnnnnnnnnnnnnnnnnnnnnnnnnnnnnnnnnnnnnnnnnnnnnnnnnnnnnnnnnnnnnnnnnnnnnnnnnnnnnnnnnnnnnnnnnnnnnnnnnnnnnnnnnnnnnnnnnnnnnnnnnnnnnnnnnnnnnnnnnnnnnnnnnnnnnnnnnnnnnnnnnnnnnnnnnnnnnnnnnnnnnnnnnnnnnnnnnnnnnnnnnnnnnnnnnnnnnnnnnnnnnnnnnnnnnnnnnnnnnnnnnnnnnnnnnnnnnnnnnnnnnnnnnnnnnnnnnnnnnnnnnnnnnnnnnnnnnnnnnnnnnnnnnnnnnnnnnnnnnnnnnnnnnnnnnnnnnnnnnnnnnnnnnnnnnnnnnnnnnnnnnnnnnnnnnnnnnnnnnnnnnnnnnnnnnnnnnnnnnnnnnnnnnnnnnnnnnnnnnnnnnnnnnnnnnnnnnnnnnnnnnnnnnnnnnnnnnnnnnnnnnnnnnnnnnnnnnnnnnnnnnnnnnnnnnnnnnnnnnnnnnnnnnnnnnnnnnnnnnnnnnnnnnnnnnnnnnnnnnnnnnnnnnnnnnnnnnnnnnnnnnnnnnnnnnnnnnnnnnnnnnnnnnnnnnnnnnnnnnnnnnnnnnnnnnnnnnnnnnnnnnntatagttaattcttttttaaaagattttatttattatgtatacaacattctgcctctacatatgcctgcacgccagaagagggcaccagatctcattccggatggttgtgagccatcttgtggttgctgggaattgaactcaggacctctggaagagcagccagtgctcttaacctctgagccatctcttcagcccatagttaattctttttaaaaggatcaattaaggatggcaggcatacttttgcaggtgtcatatgcccctctgttagtgctgtaccttcttggacttgcctttgatactttcccccctctccaggtggctgggaggcagaggcaggcagatggatctctgtgagttcatgaccagcctggtctacagagcgagttccaggaaaccctgtctcgaaggcaaaaagaaaaagaaaaccccctgtccaggtgggcagcttcttgaggttcccagagtgttgggccctactctctatcctggcttttcaacaataataccaatggaccaagggaaggactttatctagttgtatctgcctgtctcttgggcaatgtcttctgggcctgggcagcctcagatgcacaaaagtgaggatcccagatatacctgtttctacctacttctagtgtagaagtggagtacagaaccttccagagtcatggaactgtcttagctcagcagtttagtcctttatcccctgtatgtttcttattgaataactagcttttggccaagtgctctgaagtcctgccttatgggttgccagcagaggtcatgccaatgagttgagtgctaggagctgaaagaggatataacctgcagtgtaggtcttgtcccagataacctgacttcttggcccttgactacagatgagtgaagtgatgacagtgggcttgagagccttgcatagggctaggtccgtttcaaggagatatcccagccatctgtaggtttcactgggagctagaatgttgtttaattttagctctaggggacacagggaaccatcctcatacaaaggatgcagaaaggggttactgagaccaagagatttccccattgcatttgtagcaaggaggctctatattacaagtcgcatttgaggatagaagagaggaccatcaagaatacttaggaatggctgggcattggtagcgcacgcctttaatcccagcactcaggaggcagaggcaggccgatctctgtgaggtagaggccagcctggtctccagagcaagtgccaggataggctccaaagctacacagagaaaccctgtctcaaacaaaaaacaaaaaccaaccaaaaaagaatacttaggaccagagcactatgcttccttccgtaggaatgggtatccctccttcattgatgaagaagtatatacactctgttgtaagagggagaatctttgtaatggtgccttattttgtgcgtttgagaccagcctagtctacataatgagttccaagccagccaaggttacatagtgagaccctgtctccaaaatatcaaaataagccaagcagtggtagggcacacctttaattctagcactcaggaggcagaagcagaggcagatggatctctgagttggaggccagcctggtttccagagtgagttcaggacagccaaagcacctcaaacccacctcaaaagccaaacactaagagctggtattattatgttcatggtatctaagagacggctaggccttgatgctatttctaagacagtttacctgatcatcactgctagcgatcaccaactagctagcaattaatcttaatgccccacattttgcctacttgatcctatgccattctaggtacatcatatacccatctctgtgaaacaaagagcaaatacagactgtgctacctggagatcccacagcctatacctatgccttgttggtacccttgccagtttggacttcatcactctttccatgaaagatacagacactcacaggacaatggaagcaaaattttattcctcttgtctgggaaagagaactagcaagtggttgtacatagaactcccaccctcccagaaccaaaggagtcaggcgctgccaccaaatggctccctttacccaagtgaaagcccagagaggcaggtgagcacagcgcagggcaggggagactgcagtgacagagtggccagagtgatctaagggagggcccagggctcaggaaaggaaaatggacttcttgggggtgggacaggtgtgaggttgctctttgctatgggagattctggctggcatagttgtcaggctcagggcaccataatgcggtatgggctgcctgggatatgctcatcaccccacttgaccaccagtgtgtactcccctttgtccttgagcaggtaggagacactgtagagacggctgcccatgtgtttcaccaggatctcttcacagggtgtccttgggccatgcacccccaccagcagcatgttgttacctgaggtaggaataggcctcagtgactagccttaaccccttccttcagctgtaattgctctgagcccttcttcctattctacatcctgttccttgcctgtttagaacaataccccttcccaacaagcttctcataccccacctaggccaccagaagacaaatcccaggtcttccaggacattttcttcacagacacagacagacagacagacagacagacagacagacagacagaacacacccacacacacacacacacacacacacacacacacacacacacacacgtacgtcttttagacagggtttcactgtgccttgactgtcttggaactagctctgtagaccaggcttgccttgaactcagagatctgcctcccatgtgttgggattaaaggggtgtgccaccaccaactggcaatgcattttacatgcattggtgttttgcctacatgtatgtctgtgtgagggtgttggattccctgaaactggagttatagatagttgtgaactgccatatagatgggtgcttggacttgaacctgagtcttcaaaaaagaaaggaagaaaggaagaaagaaaggaaggaaggaaggaaggaaagaaggaaagaaggaaagaaagaaagaaagaaagaaagaaagaaagaaagaaagaaagaaagaaagaaagaaagactgattatataaactgggcagtggtggcacatgcctttagtcccagcactcaggaggcagaggaggcaggtggatctctgagtttgagaccagcctggtctacagagtgagtgccatataggctccaccctgtctcaaaaaaaaaaacaaaataacaaaaaaaaacccacaaaacccaggtcctctggaagagcaaccagtactcttaaccactaagctacttctccaggaagcccaaatataaagtagcccccaaagcaacaatcatacccctaagttcctgtactttccacatgttgactgtcttgtgatttctgactttgtacttccagagctagaaacagggatacttacctgctttgctgcagtctactgtgaagctgctcttctggcctacataggccttgctcagccccaggcctttggctactaccttgctgacatcagtgggacttgggcctgaggttgcaagctggggaacagtggcagggtttgtcagggagtccacaaatacagatgttgtctcatgaagactgtggttactaacaagacggggacctgcaggacagaataggtgaaactgagaagtagctagagaatatcaaggcattgaatgggcaccaacagcttagcctggggctcacctgtgaccttggctttgaaggggcttcccccaatgtgatagggcccaccatacttgatggagatgaggtagcttccgggtgccataggggtataggtgacacggtagccctcagggcactcctggcaatccatcttcaccttggaggggccatcaatggtaacggaaagggcaccagctcctgcattgcttgtgttgacgataaactcagctgggctccctgggagcatggaaggtcaggcagagtgtatgtcactggctctcctgtcttcagccacccagcacagccttgatacttccacatgcttcctgttgctaagagcttggatgcagggccctaacaactgcatccacactcagaaatatacccatgaacctacctgtgacaccaccttccaggcctgctccataggcggacaccaagcctgggtcccctccatgcccataatacccaactcggatcttgaagggacttccagggatatgagtaccattgaacttaacatcaatcaagtagatgccattctctcgtgggatgaaacgcacagcatacttatctgagatgcagaaggacatgtcatgggcctagggtacttttcagtatttaacaagcaaatggtatctaaaaggaatagccttagtactaaccatccctttcatttttcttgccaccagcaggaactcaactgctccatggagacccctctgcttccagaactgtactgggtacccaccccaacaacacatacatcctgaggactaagattatagatacctaagaagtctactgttgagtcctttggactgacaagcaaaatgcccacattgttgcctccttagaccatgtactgttaataccatgctagcaacagattagcagcaggtttagcaaggaatttgcttcaggtcatggacctgtggggagggggaaaactagtatgcttcaatagaactgctattcctctagccacagggatagactgtctctgtctctgtgtcatgtatggcacttctaaggctttcttcctagtggccatgctggaaagccattatcttcatgggtgttttatcaatctggaaagctgaggagcccaattttgattgcttacagaatcattattttccatgtgtacactcaagcctggttttagtccaatagggcagatggctggatggctagacagggatagagcctcaccttggtcaatctctgtgacatagcactcctccagagctcctgaggggctgtgcaccttggcatcaattgcccccttggctccattcagactgactgcaaaagaggctggctggttgacctttaaccctgactcctagaagcacagcagatgtggttagacaggatggctagagccagggaaaatggaagagtaggagacccacagggtaacttacccatctggtatccaacatggtttaaagagggagagccattgatctgtgagggcagcaagccacagacacacccccaacctcctatcccctaaatgtgtagtcaacaattacacacccaggcagcagaaagggaaggtggccccaccctataggtagcactcagctctagcaggctgtccctctttaaaccttagccctggtgctcaatgggcacaggcttctgttcaaagcctttagacctgagacacgagaaaaacgccacacggtgggcagggcagctcctgccaaccccaagcgtgggctgtacccggccagagcagaaacctagcacccagagttgtttctgggtgggccactcagctcagagctgaggcctgtttgccatggtgactctggtctggccgggcccaggagccccaggtgggcagtttctctcagtgcctcacctgaagactagaaacagtaaggcggcgggcgtcaccagacggagaagccacaggcaccacgaaagggctatcaggtatgtgctcctcgttgaacttgactgagacctcatagtcacctggacaggaagaaaacataggctgtattagagatgtcacatatctccaagagctagcctaggaaaggcctattgccttccacagccagcttgggtgtccctggaacctcaagatcaagaataagagccaagtggagactatgtaacacctggggtcaaaacacccacactccccctgccccagccaattctgtttccagtacctggctcctgaactacgtaggccacaccacaggagccatccttacggtcctcaaaagatatctcagccttgctggggccctcaacagcaatggccaggcctccagcaccagcttccctggtccaaatgctgaactccgctgtgggaaagcagtgtgtgctcatggagcagagaactggttccccacccccagacaactccaaacaaagccaagatcaacataactgctagctacctcctctaaacacccatctaggcctacccaggatagcaagaattagacaagcacacctacctggcactccagcttcagccctctctaggccagggcctccagcacgaaccttatgggcacccccttccccaagaggccccacagtgaactggaatgggctcccaggcacatgttggcccttgtacttgacgctgactgtatgcattcccatctcagcaggcacaaatcggatacagtaagtatggttctctccttctacgatctctgcctcgtgggtcttgcctgatgggctggtcacctgggctgtcatatcttggatactaatttctacaagtagaagatagcttgctgagcaaagccctgtctctacttgtgcttagggttaccctaggaacccttctggtcttttccctaccaggaatcttcaggctgaggtcacaatgactgccaacattggccactgaaggggcacgtcgcctgcgtgtgatactttctttcacccggccctcacccatcaccttcacagagaagggactgcctgtaggaaaaaaaggaaagtccataccctgcacaggttacaggtggacactgaagtgtgtccaggaaggctgccaaatcacaggggtgtggctgccatactcaccaggcacatgctggtcagcaaacttaatgtttatgatgtagtttccaggctctgtgggacagtaagtgaccctgcatgtaccatcctccaggtcctctgtgttgatgtctaccttgctaggaccctcaatggacagactgagcccaccataacctgggggatagatagcagctataagccagaatgccaagtgaagctatattgccccagctggcaggccaccactgcctacctgcatctctggtgtcaataataaactctgcaggttcaaaggtatgaccttcacgaagaccttgtccagagaccctcacacgactggcatcaccaatctctgactggctgatcactactgggatgggactgcttgctacatgctggccattcttcttcacatgtaccagatgttcccctgtctccttgggcacgaaggaaatccctgggcacagggtagagccatcaacagtgtgtgtgtgaacccatagcctccctccttcccccaccccaaaggcaatgatggctttaacttactatgtagccaatgactgattcccctgatttctcctgcctccaccttcccacacctggctctccctccttcccagaaatgcttgccaacttttaacctcttacccacgtggccattgcgcaaccgcttcagcaaacagggctcctcccggcctgagggtggcaccacagtggctgtgagttgactaaggtctgtttctgagatattgatgggaatatcagcagcagaacccacctttaggtgggacatacgcatggaatcgtcacctggtaagagtgtaagccattagtcactatggatccagccacaaaagactgtgcccaccctgccatctgttcttgtcattattcctgatgctccccacctgtgactcttgcagtgaaggggctgcctgggatgtgctggtcattgtacttgaccaggatgctatagtcaccaggcaacacaggcagataagaaacactgcatgttccatcttggttgtcagtgcagctgatttctgctttagatggaccctcgatggccaaagacaagcctcctgaaaagcatcacaggtaagagtgggtgggaactgtgcccagggaagcattgctgggccttggtggatgagttgacttgatggctcagcagagtcaggaagacgaggtaaagaactccattcaggatcatctcccataccagccctcagccaagggaggacaacttgggctagagcttctccttaccctctcctgcatccttggtgttgacagtgaaggtggcgggtttgttgaccactccatggctaaggccaggaccataggcagtgacgtggccacagttaacataatccacatagaactgcagaggacttcctgaggcaggaatagaagccacatggaataccaccagccccattcacgcactagtcttttgttttagttttttgaaaaagggtctcatgtatctctgaatggctttgaactcactatgaagctgaggatgaccttgaattcctgttcctccaggattataggcatatacctcatgcatgctaggcaatcaatttaccaactgacctataaccccattccagcctgttctttctgagatggtagcaataggggacaatgatggggtgagaaaaaggcagtgagcccacctgggatgtgcatattgtcatagcggatgtccatttcatgcaggccagcttcactgggtgagtagcgcacagtaacagtaccatccttattgtcagtgatggaaggctgagccaccttgcctgagggcattcgaacttcccctacagaataatggttttgaggtcaggacaggtaattggcacacctagcatcactggtttccaagttccttcccagccctcactcaccggtgatctctcccttcttgatggtaaagggaatgacaagatcaaagggcctcagggtggtcacatccagcccattaacacccaccatgggcctctctgaaacctgtggtggagaaagaaaaaccaggtgaggaactacaagaagatctgaggtttctctgcacatatggtagaacagggtcacatgagacaccaagatggccagctccaagtgtccctatgggtcaggaaaattaaacaatagaccaggctaggccttacccaggtttgctggctaccctgaggataggtatactgtggagccagctgctgagttcgtagtggggtctgcactgtgggttggtccccagccaaagcctgcagggcaaagtgggagagctggagacttttgccatagaggggcctggaaggacagactaggactttcccagatctccctgcccacccgtccttggccccttctcactgtaacttggaagggactgttgggcacatgctcgccaccgaagcgcacacagatgacatatttgcccggctggggagctgtgtagaagatgtcaaaggtgccatcctcattctccaccacgtccacatctacctctgagccatcaggtgtgcacacagtgcaagtcaccttgcctttgcctgctgctttcgtatccacagtaatcactgtctcctccccaatctggatggtggggccaataccagcacctgggagggcagagtggatccccagaggggagccagcaggtgagcctagcatttgagctactcagcctgccacccattcaggtctcttattgctacagtcaagcacagccagcccgtacccctagcccaacccataccccaagccaggatggtgagtggtttctcagaaggcaggaaggattcttctgaccacctcaagcctctttatgagagaggcccaacaggtggcactgaggtacctgggaggaaaagtaagggaccatcccatcccagcacaagcatttactgccacctcctttgccaactctgcctcacctggtaccatggcctatgctgacaaaaaccagcactctggctaggcccatggctacctgcgcccctgtggcctggccctgagacccagtactataatgtgtggacgcagtgaggcggagtcctactgcagtgtggggaatgtgacactttcctccctatccacccccgaggcctgaaggtgaaactggagtttcctgacgactgagaacgcttgctcaaccagaagcttgtagtgagaagcagcccagcacagcctggcatagacaagagcaagcagcagggaggcagcagttagcacccatgcaatacatcacagcaggcttggcaaagcagtgacagtactcaaggaacagaggatagaagacccaagccaccacacagggttgcaagggtaaagcatctaagtagcctctagggccccatagtgcccgaggaaagggaaacgacggtgacgttatgatctggggctcagctgtagaggcttgggagctgtgggttgtaaggcctggcagcaagagcacccctgcagcccagcctcccacaaggaaagcagctaggagcaccaaacctacttgaggaccaagtttaaggactgccccttttaccagcctgccaccaagtccccctattgaccttagtctcacactggcaacatgagattcagcatctttagttatagtcctggctgcctgatacccatgttgccctataagtttcctgcatgcctgccttgtatcatctagctaatgacttgggccctctcctgacagctacttaattcctcatttctgtatacagactctaggttatcagcaggtcttaaccatagcatccttgaagtatactggttaatcaggctatttactgcttaatgtcccaatggctactgacctggcacaagccaaccttttggcttgcccaaaggtgatttaagttcccttactgggctgcctgcctccattccacacataatggtcagaaaaattgaggccactccaagcccctagcctattctccccgctcctgccctgtgtacatatatgtcatctccaattccatgtgctgttctacaaagcaatctagcctctgccacaaaaacctagctatcatataatcctgtccttggccacctacccaagttccaggcctacagccttcagaagcctgtaaataattgtagtcttatcagtatccctggggtgtctctgtcttggggcagacaaacctgtctaatagggactgtcttaactaacgtcactgctgagggaatagaagagaaggaaaggagatgggtcgcaggaatgcactttggggttctgaggctgggccaggccccaccatgctggccacccaagcagttgagaatgcactacaagccagccccacccactcatgcacctccctcagcccaggacgcagatgcccctgggaggcagggatggaagtctgtggatctgatgagggctagaagactcccactgggtggaggaaaccaccttgttccctgagcccacacaggagcccttgtgagaaggaagcacctgttgcccatccccagaggtgccaagatccccagacccccaaagtcccagtggggtgcctcctaggatacacttcaccccaaagctctcagctgcaacccgagttctcagatggggaagtggaggcccagagaggggagaaccagagcactcatgagtagctctagaaacctccctgggccctgaccctccagcccatggccttgtctgcacagcctcccccactctgtccttgcctagagctgcagctggaactgtcctgggaatgaattagcaatgaagaggaaaggaaactgcctctctgggcagaaggggcattgggagtggccccagcaagcagcttacctagcccgtgacctccgattgacactgaggtgagagggcagagagcaaggagaaaggtcaggtgagtcactcaagggggcggcccccactcccacacgctgccccaagcagcgagcccttgcacacaggcacacccaagtcccgtgcctagtgccacgggggccgatagcaggctggctcacctgtgactgtgcacttgctggcatctccagtgggcacagcccggacacggtatggggagaaggggatctcatcaccaccatatttgatgaggattgtataccggcctgtcacatctggcacataagccactgtgtatgtgccatcatggttgtcttggatgtgtgttttcttgggcttgccttcagggtcctgtgtagcaaagcacaggggaggtcggtccaagccagccttctatagaaacccccaatactgctataacagggatagtttctggaccctctatccccatggcccctgaggctgcctgcatatagcagagtccagaatggaaacctcccaaacatacagtattctgtgacatgacaaaagagtagcttggtgcccagcctcagcactaggagcttccatgaaagatctcaatgttgtaacattacacctgtcctgtgagaatattacatgtgaagaagctgaaacactataggctttagcaccatgcttaccaatgaatgtgtatttgagatagtttgttcctttcaacttggagaaaactgctacacatcctaatgtagcagaccagaagcagaggcccttcccttacaagtacaactccaggcagactgggccacctgcccaccacagctctatactctatatgcccaggtcttattcctcgcctctcctccctatgcctggagatgcagtacagcccaggaagccagcaagctcaccgtaatctggacagccaacaggccctccccagcatccttagcatcaatggtgaactccacaggcaggctggcaggcacaccagtggtgttgagtccaggtccactggccttcaccttactggcatcatgggtgggcagcaccttaaccttgaaagggctgtgggatcagggtgttatgagccatcagaaaagtttcagtactcagcctgcccccagtatacacagtgaaccctgcttcttacctccgtggcacctcttcttccccatatagcacagaaatgctatagggcccttctcggctgggcacatagttgacagtctgagtaccatccgcattgtccactacatccactggctccaccaggcctagccccagtcccaaggacagaaccttaggttggctccttgtacccattcccaatcccatctcactggaggattaagactgggtccaaagcctagaccttatcatgtccttaactacccaatttcaggaacaactccaagaccctgtagtataaaacatatgcatgtgtccttaggccctctctcttgacacatttattcagtggccaattcctgtcccttataccttctctagagttctacctggttctgtggttacctgaagcccttctaccatcttccctagcttccacatgttcccaggtatgtgaactcttacctttaggcccctgcactttgacttgtagtggggcaactccagccttgcttgtgtccacctgaaaggactgagggaggttggcacggaccatgcctgggcttaggccaggcccagaacacttgactttagatgcatctgtgacatcatgcacagggaccttgaagggactacctgggggttgagacaaaaggatggcagctatgtaagagactgtggatattagcagacagtcatacttccatcctcatcatcctctccttacctggcacttggtgaccaccgtaagtgacattaaggctataggtgccagcttcatagggtatgtattctacggagcagctgccatctttattatccatgcaagacatcttggcctcagagggaccctcaacagccaagcccaggccacctgtaccagctcccctattccaaacagacaatctgtcattacctgaagttcacaagcccataggctgcccttgccatcttcagtggctcactcacctagtctctactgtaaacttgttgggtttgttggtagtaccactttggatgcctggcccatggacacgcacacgggaggggtcacagccctctgttacaggcaccttgaaggggctgctgggcacagggctgccatcataagttacatccacagagtgtactcctggaagggcagatcaggaagaattgggctttctacactcactccctgccctatctaaggtaccacccccagcacattcataccttcctcatatggagtatattccactttgtatgtaccatcaccacagtcctgcacataggtttctgtcaggttgcctgaggggatggccacaagggccttcacatgtggccctccagtctgtgtaagagcccgggcatctacactaaactcagtggttgcttctcggaagacacctagaaaaggccacagtgaggaggctgtggctgtaggactctttgtaccctataactgctattcccctatagcaagcctccttaccttgaccctcaatcccaggtccatagcactgcacacctgaagtgtccacagcaggctccacctgcaacttgctggggaagttgggcacaggctggccaccatacttgattgtaacagtgtaagccccaggacagagaggaatgtaagtaatggtgtgtgtgccatcaccatgatcctgaatatatacttcagctggcagtcctgcctcagagcagatctcaatagtcaactcagcactgccagcacttgagcagtccacttggaactgccctacctcaccagcagtagcccgctccagcccagggcctgagcacttcaccttagatgcatcaaaacaaagaaccacatgggccttgaatggggatccagggatgtgggtgtcagcaaaaaggatgttgatgttgtagtccccaggctcagtgggcacataagacacagagcatgtgccatccccattgtccaggcactcaagctgtgcttcacaagggccttctactgtcaggcccaggccaccggtgcctgctccctttgtatcaatggtgaagcgggcaggggaacctgcattgcccccctgtagccctggtccaaatgccttcacctgaaggaaagaggagatcagacagaagcagataccagcccaactttcatctacctccttttgtcccaactttcctcctcacccaaagagagacagaaacaacaaagggtcaggacaaatctggagaaaatagggcgccttcagaaaggaagatgggagctgagtgtggtagtgcatgtgtttaatcccagcacttagaactcagaggcagacagatctgtgaaaggaaggaaggaaggctttcccttatagactcccaaaaacacttaccttactaggtttggtgggagccacagcttccagtggaaagggactgccaggcacaggcacaccatcataggtcacctccacctcatagggcccctcttctcggggcacaaagcgtaccacactgttgtcagctcctagacctggctccactttgcaggacactgctgcacctgagggactcacaatcttggatgctactttgccttgaccacctgcaccctttgacttcactgtgaactcctgatctctgccaacatccacttctgttggaatgatgaaagtagggaaaaacatcaaccatcatttatttatgtagccccaagaaagactcagctgggtggggttaagtgttcctcaatgtcaatggcaaatatagcgactacttactgtcaccaaggccagacaccttgatcttgctgaggtccaggcttggagatactccaactgaaaatggactcttggggatgttatctcctccataagtgacactgatacctactgggccctgaaattggtaagaagagcaggggtcactaatcagtactccagtgtctttggcctacagttgcccagtttaagcaagtgtaagagacactagctttgttcctcagcccccttcccaggtgacaaattataaacttctttcagcagcctacctaccctaccatataaggaagggtatggctgcagcaagtgaagatacctacctgctgcacaggagtatacttgactgtgtaggtattatcatggtggtcaatgatgtccacatctcgcactgcatctcccttagccagccctgagaactggacatccagcttgcctttcccagcagttttagcattgaccgtgaaatgggtgggtttgccaagctcaacacctgaggagacataacaaaattgaggcactctactcttgagttccctacccttggttctactcaaccttctacagaatactcatccttaccagtgcgacttaagccaggaccctcagccttcaccttgctggcatcatgagaaggctccactttgactctgatggggctagtaggtgtggcctgcaagtgatggaaggaaaatagctgaagacagcagtcccaacacttagcagtctagggcctggaagcaataacacctacctggtcagcaaaaaggaccatgatggtataactgccagccccacggggtgtgtattttacagtgaaggtgtcattgtcattgcggatgatatcaaagtcaatatcagcctcagtgggacccaccacaccaggggcacacttgataccaatgctgacatctcctgtaattgagaagtggggtaagaggaggctaggacttcatggagacagcctacccacctgtcctcccattcaagactaggccttaccctggccagcctctgtacaatctacagtaaagtaggtgggttcatgcgccttgagcccagtcttggctactcctggaccatacactttgactttgtttgggtggctgccagctcccacattcacctgtagggtacaggggcaagtgaaaagatatgacatgtctatgacaggagagatgagaggctccctcaactactactggtagacaggccaaatactgctgctaccttgggacaactagaagttcctcaaacagataaaagtgactgcatgatgctgtcattctactcctacagaaacaaacacctaggttcacacagttacccaaatgtattcacatagcccaaaataacacatatcgactaaatagcattttccatctatacaatgtgatatagaaagtattcagccataaacaggtatgaagtactgacatgctacaatgtgaaaaaaacttcctatgacacttagtgaaaaaaacaaacaaaaagtcatagagcaaacatggtagtacacgcctttaatcacagaacttgatctctgtgagttcaaacccagcctggtctacagagtaagttctaggcctgcttagtcttcatggtgagatcttgtctcaaaaagaaaatacacacacacacacacacacacacacacacacacacaccaaaaaagtcacaatgtgtttgtgtataatatatataattataatgtatataattgcatcaatgtgaaaggcccggaaaaggcaaatccatagatcagtggttgccaagggctaagggaagttgaaaggataagagtttctttaagaataacaaaaatgttttaaactagactgtggtgatatctgccaattaccctgtaaatatactaaaactcaagttcactgaaaatgtcaaaactatattggtatgcaagcttgatctatttaaaaactgctatatgaacaaaggggttctggggaaatgggctaatagcccatgggctggcttaccctgaagggactgttggggatgctgacacctccccaagaaaccatggctgtgtgtttcactggctttctgggcacataagagcagctataagtaccgttgccattgtccttaactgtcgcgtccaccgggcagccctcattgtcctgtaaggcaggcaaaagcaagcagcctgctggtcagtacccagggctagaagcctaccagtcctaccccaacatgggtaggcatcccacctggacttgaactcggagaggagccttcccagcatgcttggcatcaactatgaactctgctggcttgttgacagccacaccagtcttctccaatccaggcccacgtgccttcacctggtaagaaacaatctaatctcagaacaagacaaggccatcaaagtcagacagggcagtaagtaagacatagaatggcaggacatggttctgggaataccagccagggtcggagctcttgaccccaatctcactgacaaaatatgataatgcccatccccaaaagccttcttaagcaaaagtagaaggccaaggctcaagtcagtgttttgtgccctttaccctgtctgggaaaaaatcctggggtgcctcacggatgtcagccatgaaaggactgagacggatgtcctcactgttacacagcacatgaacagcatactcgccagcctcctggggccaatagcgcacatcacaggagccatcacccttgtcgtcacattcgattttggcctgtgatgggccttccacggagaaacctgacaacagccatcaatcctattggtgcctggagccttggggtaggcttcccttgtcaccctctgcttcaggtgcccactctgaagcctccaacttacccaaggtgcccacatcatcaccaatggcctctaccacaaagtctgctgacttgccaacaacaccgccctccagtccagggccccaggcccgcaccttctggttaccacactcagtgcccaccttcacttcgaagggactacaagcaagaacaccacatacgtaagcaccaagaggcactgccctgtgcccaacagctgtgagcaaggcagaaagatgccactagtccctcaccaggtagggagatgggagggctcagaaatggttagtagtggagggaacttacctgcggccaatgttctggccaccccatgtgatagtgacagtgtatgtaccaggtattgtggggtaatattcaaagccatacacgccatcccctagatccttctgttttacacgctcctcaccctctgcaaagacaaggaagaactcaggcctgtctaactatgacctgaggtccatcgcccaccaccccaccagacaaacttactggggccctttacagtgacctttagctccccactgccagcgccctttgtgtacaccttgaagtcagctgtctccttcactcgcacacctttaggctggaggcctcgaccaacagcccggcaggcagctgggttacaggctgtgggcaaacaggccaactgagttgctggaaactgggtctggttgtcccttcccttgctataccaagccagaccattgtgattggagggctcctcagagtttggcccaacaggctggtaaggcacatgcaagaaagaaccaaaacctacaccccaagtagggacatggcaggctttctcccaactgttttgacaccagccccaatacctccacccacccttccccaccaagagaaagatatatccaaataccgttgaccccgtgggcagagcagagagcagcaggtttctagacagctggagccagctcttcccaaagcaaaagcatggaaagaagagacaagagggacaagaaaagaaagagaagcaagaagggccccagtatggggaaggaaagatagtgcttgcccagacagtagaagctcagagactggggctcccaaacaagggcttcagtggaacagctccagtggcctaactctctcctgggaggcccagaccacagcaccacagtagagaagcatccatggccaggcctaccttggccaacagtgacagtgtaggggcttcgagggatgggaacaccagcaaaggtgacatgcacagtgtggacaccctccatggtgggctggtagctacagcgataggtgctgtcacccctggcctccagctgaggctccactgtgcctttctgtcctgtagggtcctggatgatgacttccacctctcctgtgccagctcctgtcccaaggcacagactcagctctgggactccagcacagccacccccaccccccctcccagtggctggctaggcctcagctgccttcccttacctgcagtgaagatctcaaagtaggtagtcttgttggcgatattgccgctaggctccagaccagggccctgggcagtcactttgctggcatcaccctgtgacttgtccacatatacctcaaaggggctcttggcaatatgttggccagcaaagagtacagtcacctgtttccagaaggggcaggctgtgaggatgaggtaaaggaccccctgccaactacccatggctaccagcatccttctcagccaaagactcaccttatgagttcctgtcacttcaggaacataccaaacagagaaggtacggttcttgtcattattagcagtcacttttgcctatagtggggaagggccaatgagtgttaagagcacccattctaaaatatgacacagaaggatcctgatctgtcaaaggataaccctacctcttcctggtgtccagctgggtcttccacatacaccagcacctctccctgaccagcacttcgagtctccacagtgaattctgctctcttcttcaccatattgcctgtaggctcgatgcctgtgaggagagggtgaggaagtcatggatcagctggtagggccacacctttacttctataccctggttcccagacactaaagcagtaacaaggacacagcattagagatcctatccttctgcaggttcagtgcctctccccaagccagcctctccccaagacaggtacaatccaatctggcagctttgttcaatgtaaacccagtatattgagtctggcctcagaatccaactgtgtgtgctcttgccaccaatacaggcccatgtctattttctagaacagtctgatttgctgcactgttttcccaaacccttgcacttgcatggtcctgactgcttcatctccaattatagaatagcagcgcagtaggtcctccttcaatcaaaaaatttcctacaagccagtatcacttatggaacttattagcattcccttgtcaaggtaccatgacaaccctgatccattcatccccctcaagagtgattatttcattgcccagctgccatgaacctcttaggacccaagatgagagagaatactatcctatgagccagatttaaatgctcagccccctgaaatgtcactgatcaggccccctcacctggcccataggctctggcttttttggggttcagtttgggccgaagaggagctcctggtttcagcttggccttggggaactgagacaggtaggtcatgacagaatgttcatctacgttaggatccacaatttcctctggggtgatcacctgtcacagacagaagacaagagcaattggacctctcctcaccatgactaagcaccccttagctgctggggctaatgagtgagcatacctgaggaatgcctagccagtcatcagcctgttgcatggcttctcgtgcattgttcacaggcttactagcatcccaggagtcccagtcaggacataggcctacaacacagaaaaggtcatgttatgagtcccggacctataggagcaccttctaggttgacaagacagccctagcccaagatctcccatctctgtgccccctcacctggggcacaactatcaacaagagcacccagggcccgtccactctgccagtcccgactgaagttggtaatgggcagctgtggcagcttgttctgaatccatcctagaagcctctgtttgggtgtttgcttcttggcctcctcatcctcctcttcatcccacatgggcattgagatagagtagtgcaggatcagggtccagatgaggcctaagatcagcttcagattcccatccacaatggccttgctgtctgtgggaagaggggtggcaacactgggcagttagagacttccctcaccaaggccagtagggagggacgtgggcagacaaggacagcaagtgaattaggtggcagaggtccctccaagataagggtggaaagtggatcagataccctctgtccagagcctctaaaggggtgcaaggaaatatttagtgataaaggggacttttgggagagaggaagagatccatagacacatgatgacaatacaatgcaataaggggacattgccaaaaaccccaaggcccagaaggagggtgggagaacaagtgagatgaatgctttgcagctgctgggatcaagacctgcccccctacctcttgggatatatggaaatggagggaagtgacccagccctaactggcctagacacagggcccatgacctcaagctgggctgggaccaaagaggaaggctaggttggcaaagagtagttaggaaatacaactgctgctccagggtgggggatgaggcaggggaagtggaggtgttggcaaggatccttgtgtaaaggggtgtgagccccacccttttctacttccttacaccccccaagctaggagtcaagaggtggtgcaaaagaggactggctataagtcaaaggaactacatttggtcctgactcattgagggctataggaaacttatgggataacagcccccattgcccagttgaaggaggaagagtagggagggcctggcttagcctgcctctagttccaaggctcacttgggagccctggttgtagaggccttgggtgtggtcctcaactcctgctgcttcagcatatcctgcttagctattatttaccacccagcctacttgccgggtcctcaactcctgatgcttcagcatatcctgcttagctattatttaccacccagcctacttgccacctaacgggctctcaggcagccaccagacttaccacaagggaagtggttagggcgggcaccctgaacacccatcaccatggcaactcctctgagccccacccaaggccacctctaggttttaacctcctcaagggtgagtggctttggtgggtagggttttctatagctcatgtttggaaaccctacaggccttccttgtaatgtttatctagcgagtcaaaggaggtaggtcatgaaaactagaacaccactattgggagggccatctagagcaggtggcatcccagtccagtggaacagcacctggaggactaccacttaagcctctcaaagcagagtgatctttcctttccctaacaggttagtcctggcctcttgtgcatgttttcattgtcccaaaatggtgagaggatgggagaaggaagttcaaagatcaagggcacaatgactctaccccaagtcacaggccagcacaaggaaatgttaagtctttagtggcttccaaggggaggatcaaagactgacccaccatgcaggaaaggtacagctggtccctctcctggtccgattaggctggctatgctagctatgtccccctcccaagaggaggaggggaccagggcccaggattgggaagctgcctggttagatggccccgccccatcccaccccttatccccagccggccccctccctctcctaatcactgctgctttccaacatttttttgccttatatggcaaagctctgggaactaggcctgctccagccaactcacaaggaggagggaagaaggaaggcggggagaccccccccaaagagatgggctgtggcctgcctccccacatccggttgacaccccccacaaagactcagaaatgactcagctggctagactgaggctgggactaggggtgggcctccatacatccactagcatgcctctatgggcattccaaagaaagtactcagcacttgaaacctgctctctgagggaccaggagactcttggtccctcactgatttagcatgttccatcccaaaggagtaagtataacagaaagccctttatattatggagaaaaggtccattctcctactctcctgttccacattctagggtctgtccatgagcagtccctactttgagaaaggcatgggatccttcaaaaggcaagcaataccaatacctaactctgcagttcagtgaaagcacaggaaacccagtgtatactagggcacctttcaaccaatatctgcattctagatacagaaaaacaaggtctacatggaagtaagagttttgattcatgatagataggaaagctggcaaccaagcacactacggccagatgcccaggtgccttcagtcaaccacacccaacacacctggggtgtagttttgcctgcaatacctctcaatcctactcccagtttgccagaaaagatataaactggggatttaaaccacctccaacgggggagcatgttccagggcaagaaattaagggtgtcctacaaaataggagccacaagctgtatcctccactttagaggcacctaaaggctagaagggtccttttcataattgctgttgtagggggagagcctggacatcccactgttcaaggatggggtgcggctctcggacagaaacctagtctgtgcctgtcccaccacgagtgcagcgttgggggcgcggcctatagaggatgtgagctcagcctgggagaaggccaggagggcgtagcgggcgggggcgcttagcggttcgcatgctcctcaggccagcctgcttgcctttgttctcgaggactcgaggagctaggcggctaaaacgcctaggggtactcttcgttgtgcggtagctagggaggggagcctcnnnnnnnnnnnnnnnnnnnnnnnnnnnnnnnnnnnnnnnnnnnnnnnnnnnnnnnnnnnnnnnnnnnnnnnnnnnnnnnnnnnnnnnnnnnnnnnnnnnnnnnnnnnnnnnnnnnnnnnnnnnnnnnnnnnnnnnnnnnnnnnnnnnnnnnnnnnnnnnnnnnnnnnnnnnnnnnnnnnnnnnnnnnnnnnnnnnnnnnnnnnnnnnnnnnnnnnnnnnnnnnnnnnnnnnnnnnnnnnnnnnnnnnnnnnnnnnnnnnnnnnnnnnnnnnnnnnnnnnnnnnnnnnnnnnnnnnnnnnnnnnnnnnnnnnnnnnnnnnnnnnnnnnnnnnnnnnnnnnnnnnnnnnnnnnnnnnnnnnnnnnnnnnnnnnnnnnnnnnnnnnnnnnnnnnnnnnnnnnnnnnnnnnnnnnnnnnnnnnnnnnnnnnnnnnnnnnnnnnnnnnnnnnnnnnnnnnnnnnnnnnnnnnnnnnnnnnnnnnnnnnnnnnnnnnnnnnnnnnnnnnnnnnnnnnnnnnnnnnnnnnnnnnnnnnnnnnnaggcgaccaagttctgcttcagggagggtcattgagccccaaagagcacgaggaggtccggcaacatctgctaacagtacaagaaacggacgctagagctgggaaaggctgagcaattctggcacacaccaattctggcacaggattgctcaattccagctggcacgcccttacaagggactctctttcctcaaggtccctgcaggggatggaccaatcctgagagcgaatcctttcagacagcctggtactgctgggaactctttgtgcacactagtgccaagaaacagctgcgactcagggctctcatcacctaagtagccacccgcagacccctggcccgccccacccatcttcgctggtcttctcagtctctgtggccctgcctgccccctagctccatctgggaggaaatggggcaagcaactgggccagggaggctgccagcactccaggaccaagaagccttccaaaggccccgagacatgccagtggtcataatcagaagacacccaccttgtgatgcgtgtagacgggtacactttgtgcctgtctaactcacatttccatccacctggggccctgaagagttctgcagtagagttctcgtctggcacagtatccccaaggtttggtgtgaccctagaggtgtggagaggctcagggatagggtcccagattactgaaaaacaatcagcaggcaccaaggcttgctgaggagcctaggttgtgttccctgagtgggtatgaagctattcacttaaagttcattttatgatagataattctggggataatgatgaggatgctgtactgaggcagaggtgagcaaaggcacagaggcaagaaactgtaggagacactcactaccaccctccagttaagggaattcgcttacctttcccatgatagactccttccatctacattctctgtacttcaagcctctccagaatgttcccttctgtgtttttccagaaaggcaggcctttatcactacttctcaaattgtagcaatgatttatcttctgaaagactggtggttgaaggaggccttgggctggccaacatggcatgcccaaatatggttggctctcctattgcttggggtgtctgcattgcctgtggtggggctatggtaaggttatattcacaatgggcaccacctctgcctcagcatgttcatcttggtactctctataatctcacccgtcaaataacattttcagtatggaactcccctatcctacctccagtcacctgcatatcctctcttttgttttcatatatacctgcatcaagtaagccaaggggagagttgagggacaggatggcagaactgagagggggtaacccaaatggaaaatttaagggctgtcattcaagacataattagagttatctttctgattaccctgacctactggagagtaaatccccatgtatggaattgaatcaataatggattttccactgtgtgccatttgtctggatcacctgagttcactaattggcaggaaacaaggaagacggaatcatagtaatggatcacacagaagttgggagtcccagcttccagccctatgatttggctatttcgggggtaggggtgggggaggggggagagttcttggctttagagtggacacagtgccaccaccagatgtcgctccatctcaaagatccaggggcagctccaggaagccaaaatccagctctttcatattttcccttatttggagtagattcttcgatgttaggcacaccccgcccacctctcccacccccaccatcagaccctaggccaggccctcccatagggaactatagacccaagcccaccagctatactaggaccctgaagagcttttctagacttgtgtagccagggggcgccaggagggaaggaagcagaaaatccctagagtaaaaccagtgcctgtaaggcaaattcaggtgtgacaagatagagaattgatttcctgaactttccaccttggccagactccttggagctgcaagagactgtgtgtgggtttcacccactttttctttcctgggatctgggaaccttggtgcttatgttctggctggcaatgaccgtcatactcagaaaccaacctgagacaggacccaagatccaggctggaaatctgtctcgctatacccctaccacagccccgaaatcagctccctatgtccaaactagcaggggactcatcatctcatatgtattcatatgagggtggactcatatccacccttgccattggctgaaaagtgtccttctaagttgccactcacccttatcccaatcaagatactagtctcaaaagacctccctcccacccccagagagtcacacaaagaccaattaatgggtacccacgcctgtacccatctcctgccaaacactcagataccagcccctctttcagggaccccccccccatgacctcgagctcacagattcctgagcacaaacataagtttgtggtaaactatgcaagtctggacactaacacgatgcctcggacctgagtccacacccaaactgcctggcctcggcctctctgcttgctttccaaacctttcccagctcccgagcgtcgcacccactatctgactactatccggtgtggagctaattacagagccctcacctgctgtccctccaacccctgggtggcgcccagctctctgcgctcgagccagaggcctcagaactcccctgnnnnnnnnnnnnnnnnnnnnnnnnnnnnnnnnnnnnnnnnnnnnnnnnnnnnnnnnnnnnnnnnnnnnnnnnnnnnnnnnnnnnnnnnnnnnnnnnnnnnnnnnnnnnnnnnnnnnnnnnnnnnnnnnnnnnnnnnnnnnnnnnnnnnnnnnnnnnnnnnnnnnnnnnnnnnnnnnnnnnnnnnnnnnnnnnnnnnnnnnnnnnnnnnnnnnnnnnnnnnnnnnnggaattgcccacagtcacagccttctgcctctgcccaagcctggtttggccacaccggtcaggtcttgttccatgggaagagatgaaacaggtaattgcagtgagcaccaaccgttcgttcctaaggccccaatgggtccctgagcactgtaatgaacaagcccttgtagctagctatcattgatttggttcctgctaggtgcagctgttggctgtgagcaaacaacaaaaatacattgaattctcaaagcaatcaggtgaagtcttaaagcctgggggtgtgcagtgtggtacaaagtgccaaatatctgtgaagttggtaggcacagccattacctaatattgtcaagctctctcttcctgttctatgtgcccatttcctggtagtttcagattcaactcaaatgtcatttcctacagaaaggacacataaagcaatgccatttttaacattttgttattcattttacctgcaaccccaatatgagctacatttgcattatgccagtgtgcacataacatgaaattgaaatagataattgcaaattagattttccttttctgatgtgtgtgtgtgtgtgtgtgtgtgtgtgtgtgtgtgtgtgtgtgtgtgggctgggactcactctgcagctcaggctgatctggaaatcactatgtagcacccagactgggctttgaagtggcaatccccctcccaatttctgtttcataaatgttggaataacaggcctatttaatttgttttcctactcaatattatcaaaaagagaaggtggcacatgctatatagtaagataaaagggagaaaagaaagaatatgaaagagcagtgagggggagtttgatcacatctccagagtcaatttagtaatctatagtgtaacttgaagagcaaagtgctggggtcccctccaggcactatgcatccagtgctacctttgttggctccactggcaatgacatttcacattctggcctcccaataagatcaagatccctcactgttctgtctagcaggagacctctgctagggaagccaatgaattatcataaattgctaaattagtggcttgatttcaagtttgtgaggtggcactagagtacatggagatgattgtctttccggaggataaacccatttacccacaggcatggtaatcagatcaaccggtaggcagatggaaggggcatgggggaggtagtgactgtgagctgcatttcaaagacatcccccacacacatacaaactgaatttgaactttctttactgcccctcccaatgcatacacatccaagaaacccaagaagggtctccaatttctttttcttttcttgttttttcttttttggtttttggagacatggtttctctgtggctttgcaggctgtccttgaactagctcttgtagaccaggctgctcttgaactcacagagatccacctgcctctgcctcccgagtgctgggaccaatggtgtgtgccaccaacacccggcattccagtttctttcaggtctatcaactatgaagattagttaacacagcactaactgttccttggtaaaaatcatgaattaaaaacattttcttgctggtcggtggtggttcatgcctttaatcccagcactcaggaatcagaggcaggcagatctctgagtttgaggccagcctggtctacagagtgactgccaggacagccagagctacaaagagaaaccctgtctcaaaaaacaaacaaaattttcttcctgtgttgaataaatgttttcatggtgacttttccttaaaactggtgggggggggtctggactgaattcagaatttaatgcatgccagccaaatactctaccactgagataactacctcccaagcctccactatgttacccaggtagccttgaattcaccttgtagctcatgcaggccttgaactttcaattctcctaactcaaaatcctaaatgctgagtgggattacaggactcacaaaattttcttattcttagaatgggtcacatatagccaggcggtggtggcccatgcctttagtcccaggactcaggaggcagaggcaggcagatctctgtgagttcgagaccagcctggtttacgaagctacacagagaaaccctgtctcaaaaaaaagggtcatttccaagattttttttcccaaatagccacacctgccaatagctactccctcccaggaagaacttccgagagacctacagaatgccctgcatacatccttctggcacctctgacaaatcctgagtgaggtctgaggccagacttttgtagcacctagatgaccaggtacttcctgtggagaatatttccatgaatcactcaatttggggctattgcaaaagcctctttagactctgggatcttgattcttctgctgaatggtagagaagggagttacactgcaatggactagacttaagctccaggtttgtgcaagaaaaccacagttcagattcctgataacatctgtgataggattttatagtgggatagtgaggggattaagaggcagtgtgctgaggcaggtgcagagggtgatccttagggagaaggcaaacctaaaattccttgacctcataaggaagcaacttgattctgtagggggggcatagggtagtactgagcaatcactctgtatgcagaggcctctgggagaggggccagcatagggggagggaaatgctgggaaatctgattttgccaaaactaaaaaatattcatgaagcagcctctgaatggacagaatgtctctctctgccctactctgtctctcacttacacacactcctgcccaaggttctcctgtctcttcgtaagacagtatcttttccagggattcatatagctccatttccagggacagaggagggcactgtcttttaaatccattcaacaccaacccttcttcattaacgacttttttatgtggtcaaaacagggctccttctcatcattgcctactttaaacttccataaagaattggcctgtggccttcacctaaatgccatcaggtcagcctagaactgatcagaacactcactatcactatcatttaagacagtggttctcagccgggtgttggtggcgcacacctttaatcccagcactcgggaggcnnnnnnnnnngtgagttcgaggccagcctggtcttcaaagcgagtgccaggataggctccaaagctacacagagaaaccctgtttcgaaaaaccaaaaaaaacaaacaaacaaacataactatagaaaaattatagttgtgaaatagctacgaaaataattttatggttggggtcaccacaacatgaggaactgcattaaaggtcacagcattaggaaggttgataaccactgctttaagagatcaggtatcccaggcaccttttctgcatgtacccctcctcctaagtctgtccaataaggggcagcctacctagttccagatgactttgtgtagaacaataaatacatggtcactattcgagataacctttgtctgatacagatcctttgtaagccttaattgattcccggtttgcctctaggttgtgcaccctgatggcctccaaggtcataccaagtttaggggttattctactctgccaaacaagaactctactgcagaactcttcagggccccaggtggatggaaatgtgagttagacaggcacaaagtgtacccgtctacacgcatcacaaggtgggtgtcttctgattatgaccactggcatgtctcggggcctttggaaggcttcttggtcctggagtgctggcagcctccctggcccagttgcttgccccatttcctcccagatggagctagggggcaggcagggccacggagactgagaagaccagcgaagatgggtggggcgggccaggggtctgcgggtggctacttaggtgatgagagccctgaatcgcagctgtttcttggcactagtgtgcacaaagagttcccagcagtaccaggctgtctgaaagggttcgctctcaggattggactctttgcattgctgtggaacagactgcccctgaggaccctcagctctggaagatgagggaaatgaagatagaggaggagggtgcaggattggggcagagttcaagnnnnnnnnnnnnnnnnnnnnnnnnnnnnnnnnnnnnnnnnnnnnnnnnnnnnnnnnnnnnnnnnnnnnnnnnnnnnnnnnnnnnnnnnnnnnnnnnnnnnnnnnnnnnnnnnnnnnnnnnnnnnnnnnnnnnnnnnnnnnnnnnnnnnnnnnnnnnnnnnnnnnnnnnnnnnnnnnnnnnnnnnnnnnnnnnnnnnnnnnnnnnnnnnnnnnnnnnnnnnnnnnnnnnnnnnnnnnnnnnnnnnnnnnnnnnnnnnnnnnnnnnnnnnnnnnnnnnnnnnnnnnnnnnnnnnnnnnnnnnnnnnnnnnnnnnnnnnnnnnnnnnnnnnnnnnnnnnnnnnnnnnnnnnnnnnnnnnnnnnnnnnnnnnnnnnnnnnnnnnnnnnnnnnnnnnnnnnnnnnnnnnnnnnnnnnnnnnnnnnnnnnnnnnnnnnnnnnnnnnnnnnnnnnnnnnnnnnnnnnnnnnnnnnnnnnnnnnnnnnnnnnnnnnnnnnntcgcaccccctgaccgcctcgcaccctgtatctgaccaggctccactcgcaagctctacgaaaagaaaatcttcgagtacgagacccagagacggaggctctcgccccccaactcgtcatcctcttcattctcttacaggttctcaggtgagttccccgccgcagagcctggctgagctgcttggagacacaaggcttggggagggagggtgtggctgaagcaattgagggaatagagggatgcctaatggtctctacctcccccttaatgcagacttggattcagcctccgtggactcagacatgtatgatctgcccaaaaaagaggatgccttactttaccagagcaagggtaagacaggtgtggggtgggtcctttatcagggaatttgggcacagggaaacctaagacttcaccccagttctcaatggctctagagtggagaaactgtcacagcacacacacagaatttggggccatgaggtcactttctcctttaccactgtttttccttcccaagaatataatgacgactactatgaggagagttatttgaccaccaggacatatggggagcccgagtctgtgggtatgtccaagagctttcgccagccagggacctcacttgcagatacccacaccttccatcaccaggtgagttgactggcagcatatctggatgtagtctgagaggatcctaactgggtctggataagtccaaggagatattaggtacagagagtagtccttaggcggtcaaatagggttagggtcggcatacagctgtttgggtcagagttctactttggggcctccaaaactgaagatttaattactttgccaggcagtgatggcacatacctttaatcctatcactggagagtcagatgtagtcagatttctattaacttgacgccagcctggtctacagagtgagttctaggacacccagagctacaaagacaaaccctatctcaaaaagaaacaaaacattaattatgtttatgtgtctgggatagtatgcatgagtgttggtgcatttttaaaaagtcttaaaaaaaaataaaaaccagaaacccaagataaagttgcatgacatttttaaaagttcatttgtcccatcatctctcttttcttaatacaaattttattctgtagctggagctacaggtggttgtaaactccctggtggtgagtgctggacactgaactcaagtatccagccgatcaaacaaactgttttgatcagagcacatgtagcattctttgcactctagtctgggatctagttttaagccttctgagaataagggggaataaaaggatgctgagacagagttgacaggtatagtcactgagtagcaaggctccacaggtaaaaaggccacagatcagaatcgttctggagggagggggcaatggtctggcttctagggtatgattagagtaggctggtcagagacatttttgggaaaccacccttcccccaattcctaacccctgttgtcttgcaggttcgtgatgatattttctcttcttcagaagaggagggcaaggataggtgagtagtgaacacacataaggacagggacaggtttgggcctcaggctctcctgcccacttgtttccttcttttgccacagggaacgccccatctatggccgagacagtgtctaccagagcattgcacactaccgtcccatttccaacgtctccaggagctcactgggcttgtcctattatcctacatcctccacctcttctgtgtcctcttcttcatcttctccctcttcatggcttacccgacgtgccatcaggccagaaaagcaggctcctattgctgctctgggccaggatcgtcaggtcccactctggggccagctattgctcttcctggtctttgctgcctttctgctctttgtttactactccatacaagctgaagaaggcaaccctttctggatggatccctgagagtattggtttctgagcagctcttaacaagagttttggctgattgccttatcagtgtttgctgggggtagggtgggtgagggctttttatgtgttctttaaggggttcagggcctagcctagggcagtgcttatctcccacctcctcctgccaagaaggcagcaaatgctggccttccacaacccattgggcccatatgtaccttcctctggagcctcctagtcctattgcttctgacccttagggctccaggagataagaccccacttctttagaggaaaacttggtggaggtgatggtagttgtcatgcatgcctgtttgttgtcacccctttttagggtgtattaaccaaaggccaccctggctttgtttttgtggacacaataaaaaacacatttatttttactttgttggctcttcctactggggtgggagttgggctactgtggcacaagtgcttagtcttgggtctcaaaaatcactgactttaacctttggttctacattttagtttgttcttggggaagggatccagtgttacccaaagataagtctatgttttcgttgtgggttttatttctgggctcactccctgaagcacttaacaactacttacaaaataactaccatgtaaccaaatgtgcccatgggaaattcaggcaaaactgcattatgatgatacatgcaggcactttagccaggagaggctcatgccaatatgtgaagttacaaggttagaaaagaaatgaggcatcttgccagtggattttttgctcagctcctgggattgatagttatttgatagcatgggggtagatagaaaaactgcaggatactcatcctaattctttgcctgtttattgttgctcagtttccaggtcttctgtcctggatacatattacataatataaaaaagtttttatccaggcatagtggtacaaacctttaattccagtatttgagagccagagacagaaggatcactttaaatttgaggctaccatgatctacatatcacagttccaggacagtatctcaaaaagaaaattttaaaaattaaagcctggactgcagagataatgtcatagtagttaagaggactggttgctcttccaaaggacccagattcaattcccatcacccacatggaagctcacaactatagttccagttccaggggacccaacacctatggcaaaacaccaaaagttcatttgtcctgtcatctcttaatacaatttttattttattagggttttttggtgtgttttgttttggtttttggacacagggtttctctggctttggaggctgtcctggaactagctctgtagaacaggctgatcttgaactctcagagatccacctgtctctgccttctgagtgctgggactaaaggcatgcaccaccactgcctggctttttgtttttgtttggtttggttttggttttttttttttttttttttttttttttttttttactttctaaaaacacaaaaagattatttccattataaacataaaagttttgtgaatcatcccctactttcctttaagttagaggtttacattttgttgtaggtagcaaggcatcctaaagtgatgtgtgaattagtatataattttcatggcaggctctcattttagctcagtatgtaaggatagtgtcaccaatcctaacaatgagaattcctacaagttgtcctctgacctccacataaaagccatgacacaagtgtgtccatagaaatgcatatataaataatgagggacaggcagatctcttgagtttgaggttacaggacagccagggctacacagaaacctgtctagaaaatatactcttcaggcaccatgatatatatgcaggcaaacatttatgcacataatattaaaataataaaaaggtttcctgggggctctgagccttctctaaggctctctagcaacctgtctaggcacctttcagattcctgaggcctctcattttggtttggtcctcaatatccaagtcttgtaagagctctgaggttccaactccatgcttcactgaatcttaagggttgtgttgtctcagaaaggctaatgactacccagacaagaactaagtgttgtgccacaggcttgtgactgctctatagacctcatgaaataaaggctgccagctctgtagagctccagaacacactctcaaagacctaaggggcaacaataactccaatccctagaagtttccaagggttcagagttaccagtggtcaagacatctgagggatctaggactctagatccccaccccaggacttcagtagccaatggagacagcagggtgtaggtgctcaaagactgttccagacactaatcagcatcttaattctctccctctatgaccatgaaagaacagcctgtggaagtacaatgtgcacagtcaccatgattgtgtgctaggccctgatgaccagggaggagcctacgagctgaggatgcataatggaatctacagtgtggaaagaggtcaaggaaggcctgtgccctatagagcaaggcaagcacagtgtacatctgatggacctaacatataggaggggtctacccaaagggttcttgtgttttgttttgttttgttttgtttcgacacagggtttctctgtgcagctttggaacatttcctggaactcattctgtataccaggttggcctcaaactcacagagatccacctgcctctgcatcccaagtgctggnnnnnnnnnnnnnnnnnnnnnnnnnnnnnnnnnnnnnnnnnnnnnnnnnnnnnnnnnnnnnnnnnnnnnnnnnnnnnnnnnnnnnnnnnnnnnnnnnnnnnnnnnnnnnnnnnnnnnnnnnnnnnnnnnnnnnnnnnnnnnnnnnnnnnnnnnnnnnnnnnnnnnnnnnnnnnnnnnnnnnnnggagattgaactcaggacctctggaagagcagtcagtgctcttaacctctgagccatctctccagccccctggatccagactttctacacctagtattaacatgcttcatggtccagggatagctgttcacagaccactgcccaagagacaggcagatacaactagataaagtccttcccttggtccattggtattattgttgaaaagccaggatagagagtagggcccaacactctgggaacctcaagaagctgcccacctggacagggggttttctttttctttttgccttcgagacagggtttcctggaactcgctctgtagaccaggctggtcatgnnnnnnnnnnnnnnnnnnnnnnnnnnnnnnnnnnnnnnnnnnnnnnnnnnnnnnnnnnnnnnnnnnnnnnnnnnnnnnnnnnnnnnnnnnnnnnnnnnnnnnnnnnnnnnnnnnnnnnnnnnnnnnnnnnnnnnnnnnnnnnnnnnnnnnnnnnnnnnnnnnnnnnnnnnnnnnnnnnnnnnnnnnnnnnnnnnnnnnnnnnnnnnnnnnnnnnnnnnnnnnnnnnnnnnnnnnnnnnnnnnnnnnnnnnnnnnnnnnnnnnnnnnnnnnnnnnnnnnnnnnnnnnnnnnnnnnnnnnnnnnnnnnnnnnnnnnnnnnnnnnnnnnnnnnnnnnnnnnnnnnnnnnnnnnnnnnnnnnnnnnnnnnnnnnnnnnnnnnnnnnnnnnnnnnnnnnnnnnnnnnnnnnnnnnnnnnnnnnnnnnnnnnnnnnnnnnnnnnnnnnnnnnnnnnnnnnnnnnnnnnnnnnnnnnnnnnnnnnnnnnnnnnnnnnnnnnnnnnnnnnnnnnnnnnnnnnnnnnnnnnnnnnnnnnnnnnnnnnnnnnnnnnnnnnnnnnnnnnnnnnnnnnnnnnnnnnnnnnnnnnnnnnnnnnnnnnnnnnnnnnnnnnnnnnnnnnnnnnnnnnnnnnnnnnnnnnnnnnnnnnnnnnnnnnnnnnnnnnnnnnnnnnnnnnnnnnnnnnnnnnnnnnnnnnnnnnnnnnnnnnnnnnnnnnnnnnnnnnnnnnnnnnnnnnnnnnnnnnnnnnnnnnnnnnnnnnnnnnnnnnnnnnnnnnnnnnnnnnnnnnnnnnnnnnnnnnnnnnnnnnnnnnnnnnnnnnnnnnnnnnnnnnnnnnnnnnnnnnnnnnnnnnnnnnnnnnnnnnnnnnnnnnnnnnnnnnnnnnnnnnnnnnnnnnnnnnnnnnnnnnnnnnnnnnnnnnnnnnnnnnnnnnnnnnnnnnnnnnnnnnnnnnnnnnnnnnnnnnnnnnnnnnnnnnnnnnnnnnnnnnnnnnnnnnnnnnnnnnnnnnnnnnnnnnnnnnnnnnnnnnnnnnnnnnnnnnnnnnnnnnnnnnnnnnnnnnnnnnnnnnnnnnnnnnnnnnnnnnnnnnnnnnnnnnnnnnnnnnnnnnnnnnnnnnnnnnnnnnnnnnnnnnnnnnnnnnnnnnnnnnnnnnnnnnnnnnnnnnnnnnnnnnnnnnnnnnnnnnnnnnnnnnnnnnnnnnnnnnnnnnnnnnnnnnnnnnnnnnnnnnnnnnnnnnnnnnnnnnnnnnnnnnnnnnnnnnnnnnnnnnnnnnnnnnnnnnnnnnnnnnnnnnnnnnnnnnnnnnnnnnnnnnnnnnnnnnnnnnnnnnnnnnnnnnnnnnnnnnnnnnnnnnnnnnnnnnnnnnnnnnnnnnnnnnnnnnnnnnnnnnnnnnnnnnnnnnnnnnnnnnnnnnnnnnnnnnnnnnnnnnnnnnnnnnnnnnnnnnnnnnnnnnnnnnnnnnnnnnnnnnnnnnnnnnnnnnnnnnnnnnnnnnnnnnnnnnnnnnnnnnnnnnnnnnnnnnnnnnnnnnnnnnnnnnnnnnnnnnnnnnnnnnnnnnnnnnnnnnnnnnnnnnnnnnnnnnnnnacagagggcaccagtttgagtcatggtacctgccaaggactaccagagacagggcagtgtatgacagtgccctccgtgtccctctcctcatcgcccaacagagggccagtgtgtgtcctttctctgcaacacccataccagagaggactccgagatcaggctgccacagtcagtgagaggggcccaaggggcagaacactagcccacaacaggcagtcccaggccaaattaagtgcaagtagaacttgatctgtagccaaagcagagcccttgatttgagacagctggagaggctctgcttgtaggtgccaagagtggccacactgtctccaaaagaccctagggtcctacttgtgggcagggacatactgggatcagcttctggagtccctggtgtatgagacccttgccatgatgcttcagtacagctctactggaaacctagatggaaacagtggggtatgagggaacagctgctaagccaggatggatacattggtcaagttccagctggcagttgtcatgactgcctagctacagagaggcctgtaaagggacccatggccaaggcaccatgcaaatttgagagggcagacctaaccctatggtgttattttgtttgtgatctaacaaatgatgcttgcctgaaaatcagagaagcagaacgtccagccactaattatctctactgaatcttcagactgaattcgagatcctgtccctaagaatcttctgactgaatgctgtgcctactaaacctcagactgaatgccatgagctcttgtctcctcccaccttatattcctctctttgcccaaccatatcattcttctctccagttccctaattccgggattaaaggcctgtgacttccaagtactggaaataaaactgtgagcctgtttctctcttagactggatcaatgtgtaccccagggtggccttgaacgcagagatccgtgtacctctgctgggattaaagatgtgtgtcactgctgagagcccaaggacactcagcccagcaccctggctgaaagaatatctcatgaaccacaaacatatgcatgtaagaaaggcttgggatactgtgatcctagggttaaaaatttgcaaagcataggccaggcacttttaaacgacattcatccacaaaaataaatcttaagggttgaagtgaagggtcagttgttttctttgtttgtttgtgttggttttttttttttttttggtttttcaagacagggtttctctgtgtagctttggaccctctcctggatcttgctttgaagaccagtctggcctagaattcacagagatctgcctgcctctgcctcctgagtgctgggattaaaggcgtgtgccaccaacacccgggtgaagggtcagttgtaagagcactgttgttcttgcaaaggacctaatgccagttcccagcacccacatggggactcacaactgtcagcaactccagttccagatgggtctgacaccttttgtcctctgccagctcagacatgcatatggtgaacttacatgggtacatgtcaaaacaatcatacacatacaataaatggctgggtgtggtggcacaggccttcaatcccaacactctggaaacaggcaggtgggtctctgaaatggaagctagtctgatctacatagtgagtttcaggccagccagggtaacatagatgttgtctcaaaaaatgtttaaatgaaaaggagaacaaaatatataaataaacaataaatgcatagatgtttaaagtaaacaaataaaaaaaactgttggagaacagaagagccattcatgtggaaggcactaaccatggggttacctgccacacagcagttgggaaacagcagagtgcagtccatccagagtgagcctaaagctaggaaagcccagagggagttggagaatgacaagggaaaagggaaagttttgactacctgtgggtgactctgggagataatcttttcccatagcagtaagatgctaggtccaggctagaaccatgcttttaatttcagtactgtggaggcagaagcttgtggctgtctgagtttaagtttaatggcagcctggtcaggccagccaaggccacacatagtaagactttgtgtcaaaaacaaacaaacaaacaaacaaagaaatgacgcaagctaggttctcacttatcccccttcagctaaagaaccgaccacctctacaactgcataaataccaatcagggaaaagactggctggagacagctgtcttcaggggatagatggcaatgtgtggggatggagtactgtgcagaagcctacaggaactgtcccagggaagcaatatggaagagaagcagaagaaacctactagctctgggctggggctagagctcctaagcatgttggaacaagctgggcctgtgtatccgggggttgcacgttgagaactgtagggaaggaaggcttctagtccctacctttacttctagaaaagccaatggctttctctagagcactgtctgtatcatgtctccctcagtgattgttggccagacacgtgcttctgggtcagaacaatattttcctggtttcttgtctccttagacagtagtaaccttatatgggaaagtagtcagtagttagctgccaatcttcctatacacacccagatgtacattttgaacttgtcacagtgaaaagaagggcgtgcctctctctctctctctctctctctctctctctctctctctctctctctctctgtgtgtgtgtgtctcctctctctcctctctcctctctctctccttccctccctccctccctccttctccctttttctctgtttttcgagccagggcatctctgcttgctctcttgaccaggctggcttctaactcagagatccacctgcctcggcctatagacccgaaagttgggattgaaggtgcatgtcaccgannnnnnnnnnnnnnnnnnnnnnnnnnnnnnnnnnnnnnnnnnnnnnnnnnnnnnnnnnnnnnnnnnnnnnnnnnnnnnnnnnnnnnnnnnnnnnnnnnnnnnnnnnnnnnccactgtttttgcccagtttacaatctccttgagaacataaattatcttttcccgagagtttagagacagtggggagggcccaactagtgatgacgacggcaatcgcctacacaagcttcttgtcggcctctagagggcaaccaagagcctatcatggtgctctttgtaggctcttccgtgtaggtagaagcgttgtgggtgggtctccggacccaacctccctgctgacaaaggaaatccgagttcctagcatggcgccttcgcgccatttcctgtagccttgaggaaatcctgaaccaatattctggagtcccattaagctagtgaacacctgcgtgatcacccagttctactgagaaaaactcctcttttcaagtcttagaatattgttagaatattagtcacagcaaagtctgtcaatgccccgccccaaatggccagacggaagccgctttctcttgcctatgtgtcgaaaccccattcgctagcacgtcgccggaaaccggtgtcccgtcaccaaagcgctctgcgcatgtttcgtgccggcctgctacacatgcgcagagcgccgctgcatctatgatcctagcgtctgatagagcgtctacactaccctaaggctgagactctatggtacctacgctggaagatgggccgcctatataaagcatgcgcaggcgtgggagcgtctcttttcctccggtgcggtgagtgtgttcggttgcttaatggtgttcagtggtttcgtcgttctttgggattctgggtctatattcttactttgaacgtttcattacagccaccgactatcctattgtcatcatgggtcgccgccctgcccggtggtgagtgctaaatccatactatttctattgtaaaaacggaggaaataattgcatttcttctcaaagacattttttgggagttggactcctcgtcattcagcgacgctgagctaaaaactggccccagatttactttactacttcactgggggctttgtcttttcaagcttgtggattggttaaccaaccaacgactactttgtagcctattttgtagagcaagaaacatgtgcgtatgcactcaaccttctgtcttctcaaatgaaccttgtcataaagactcccatgcctttttagtgacttctgtatctgtctttgttatttctgagtcgtgtgctttgtggtttcaaccggacaccaacggcccgccaagccattttaggcatcacctagctgcatgccctgcagagggcgccatattctcttcacgtggctgaggcgggttttatgtcacatgctctgaagtcttaaggaaaaattgtgctatctcaccctactctgatgaagggttgatactggtgattggtttttgtttaatgtgtcttatgtggcaatctgtttagttgccttagagtcagtttttactaaccgaatgaattcagacttggtcttgtccctttgccactacgtaaagcttgctgtgtttagttgccactcttgttacacctgacttttcttgctcctgcagttaccgatattgtaagaacaagccgtacccaaagtctcgcttctgccgaggtgtccctggtaagtaatgacaaaactgcaaatgtggatctgtggtgctgtctgattcccactccacgggcacttagtaccacgtgtttgtgtttttcagatgctaaaattcgcatctttgatttgggacggaagaaggcaaaggttgatgaattcccactttgtgggcacatggtgtcagatgaatatgagcagctctcttccgaaggtgaggacccttttgttgatcaacatttcttcctgtgtagtctgtatggtagtagccacttcattagtttgagattttctatgtgatttattccactaacatgacctccatctctggacctacctctacactatcctgttttcactgctgtttttctccccactcagctctagaggcggcccgtatttgtgccaacaaatacatggtaaagagttgtggcaaggatggctttcatattcgagtgaggctccaccctttccatgtcatccgaatcaataagatgttgtcctgtgctggagctgacaggtaagctggcagttagcacccttttgcataatttgtgacatataatgtgtgtttttttttcaccagtcaagaccgataggttggaaagattgctcagctctagctaggagcacttgctcttgaggaactgttcaattcttaaatccatgtggtggctcacaaccatctctaactacaattctaggggattccgtgcttctgagagcaccaggcacactagtcgttcacaggcatgcaactaaggccctaaagtagagaagaaaacttttgtgctgttcgtactcttctgattatgacgatcatcatgcatggtttctgttttgtttttccagacggggtttctctgtatttggagaattttgggattttatttgcagctaattaagccgatcaggttcctttccccatgggagcctggtgtgcaatggttgcaaacagcagcctccttggtagtgtatgcagcctatcgcctatatgggctgccctaagggaccttggagacaattttctcagttgctcaagtttctgatctcaatgatatccccaatctaggctccagacgggtatgcgtggtgcctttgggaagccccagggcacagtggccagggttcacattggccaggtcatcatgtccatccgcaccaagctgcagaataaagaacatgtgattgaggctcttcgtagagcaaagttcaagttccctggccgccagaaggtaggtgacattatttattaacttcccttctgttttctttctctgatctcattgacttttttttcttctgtctccctctagatccacatctcaaagaaatggggcttcaccaagtttaatgcagatgaatttgaagacatggttgctgagaaacggctcattcctgatggcggtgggggccaatatatccccaatcgtggtcccctggacaagtggcgagccctgcactcctgagagcttccacagtgctctcctgtaccctaccaaatcatgttcagtaataaatctcatccagtctgcttacatgtttgtatctgatttttagttttgtttttcaaaaccgggtttctgtgtaacagccctggttgtcttggaactcaatttgttgaccaagtgctgggttgtttgttttttttttgttttttgctttttcaagaccgggtttcgctgtgtccttggaggctcctggaactcagagatgtgagtgttaggattaaaggcgggtgccaccactgcttgtgtgtatctgattttgggggggggggttcgagacagggtttctctgtgtagctttggagcctatcctagcacttgctctggagaccaggctggcttagaactcagatccgcctgcctcctgagtgctgggattaaaggtgtgtaccaccaacgcccagccggttgtatctgattattaatatggggttttatggtttggttatacagggcaacttagtgaactgagcctgcaaagagttacaactggtgattttattggaacattttaaacctgacatctctagcagagccatgttcataagtacagagcaaatgtatcagggatatgtggtccagagagaaggctggcccatatagtttaatcattggaataacatgattgtttggagctaaaaattttgaagtaaacctgtggtgacaatgctacaatctaccagagctttttgtaagctggtggtagagggtttttaaagagttcatgtctcccaagtgagcatattttggtgagctcgttttctttttttttctttttggttttttgagaccaggtttctctgtagctttggagcctatcctggcactctggagaacaggctggtcttgaaccacctgcctctgcctcccaagtgctgggattagtttaaaggcatgtgccaccaacacccggccggtgagctcattttctattataaggtatctggaatacatgttctgtctggctctaaatgtgtgttgcagagagccctggagcctgctttgtctctgtgtctaaggtggaatggcttgaagtgacaagttgtatctattccaaatgcaccaaaacccacggtattggatataataggaaataacactggtagccctgtcttcctcttggaataataagcagcagaaagcctacataaaaagaaagggaaggctgtagttgaaaccattcagatcttgcttggcttcaggagatgccagtgttttaagtcattgtccataaggtacaaaaggtgttaagccacctagctcagttgagatggcaaaagtgacagcaggagcagaatggccaaactgaagagttgaatgttgtgagttgcctgactcagctccacctccacaggataatggtcactgatgctgagagccttgggagggacagcaagatgaagtgtcagttcctggggctgaggggctttcctgtcaactcacctccacaattctgccctcagccattgaataagcccttatgttaacccagcttctttacctcttcctcagtcagctgaaagctcctggggaagttgaagggtgctgcagccctcagcagggtctgacagccctgcccatgcatcacaatccgatcgtaggtacagttggtgctggcccgcactgtagtgtcctccccatcagaaatcacccagtggaagcctgcctcagtccgaaggagcaggctgttgagacgctttttagtcagtgatgcacagtcagcattgaagtccccaagcaggatcacatcctaaaggttaaacaagtgattggattttgccacagggcaatcccaccaaaccctctcctgtgcaagctatcatccctacctcattttgccagcgttgggagacatccagaaacacatcatatagggcattcagctccttctctacatccttgggtgtagtgtggagtggaaccagtaccacacttggaaggactgcaaggcccaggaagttgaagctgccatagctgtcagctcttcacatccacttccacttcccctaggaaccaacccacaggaaagccagccaaacctccctctcctgtttgcatgtaccagacccacctttcttcccctcttacttttgctagggagagcgaactgggccacaaaaggttctcgggcaaaaaggtcatttgtgtcattgtactggtaggaattcagaatctgtgtcttgtcagacctataaaaaccaaggggtgggaagcagtggccccaagtattatgtgagaacagcagagctagtgctcaaggaggaacattcctggttcctagttctgccagtttcatgtgggtacaaccttattttctagaacttctggggttttgtttttgtttttgtttttttgtcttttcgagacagggtttctctctagctttggaggctgtcctggaactcactctgtagaccaggctggtctcaaactcacaaagaggattaaaggcgtgtgccatcaatgcccagtttcttttttctttttacttacttttttgacagggtttctctattatgtagccctgggtgtcctggaactctctagactaggctgaccgtgaactcacagagatccacctgtctgcctctgagtgttgggattaaaggcatataccactacttctagcttggagggtttttgttgttgttgttttttaattaccagggataaatgtgtaccctgccactgagtgatgtcttcagctccctagaactatttttgtttttgttaagatttaattttattttatctgtatgagtgttttgcctccatgtatgtctgtggaccatgggtctgcagaggccagaagagggtgtccaattccctggaactggagttaataatgattgtatgctattgtatgtgtactgggattaaaccctagtcctctgagagagcagcaagtgctcttaaaacacggaatcatctctccagctgtacctagaactttcatgagtttttttgagatccattttcattattgcccagctagtcttgaactcatggactccagcaattgttttatctaatttagtctcttgaatagactagtgggtcttcaaaccaccaggaccagctagaattgtctttatgaggatagaatccaacccctgtactcaccggtagatatacacatacttctccttgtatgtgctgcgccctagcagggagctgtttaggaagctgtaagtcctggaactgtcaaatctgccagaaaaagaatccagagtcagggtccttgaggctctgggtagaacccagattagattaacagacccttctttacctattaagttctcgaagcagaagagagacagttttctgggaagaatccaccacctcctgaagcaccatgatatcacatcgagccaggatctgcagggaatgagggataacagctcaattcaaagttatcactatggaggggttaacatatgtaaagactggtgccagggtggccaaagacagcagtgggactaggaggatcccaggaaaacaaagagcatcattctattataccttggccattgcttttagaggatgaggttggttattaaatgatagttgaaggatacttcacatctgtgcactcacatttccagatatccccctcccctttttagtgcatgtccctggtcaggcagagctgagggcttttggtcaaggcacacagatttcttttcttttcttccttttttcttttttctttcctttctttttttttgttttttgagacagtgtttctctgtaactttggaggctgtcctggaactagtgtagatcaggctggtctccaactcacagagatccacctgcctctgcctcccgaatgctgggactaaaggtgtgctccaccaatgcctggcagcacacagatttctgcaacaatgaatttaacttacttgaactaaggtatccatcactggctccttggccaacttgctcaatgtcagtctttgggcattgaaggcacagatacgaaaggcttcagtcccaccagccaggaagatgagcaggagagccacagtaagcccatgcatggccatatatggcatcaggagccctccaaaggaatccgggttgttcagagtgcattggcactgcagctgatctcggctaattggtgttctccctgcttctggccctgaatgtttctggcatcttttcctgggaagtgtaagatacatgtggtttggcataaaactttctacgcatggtagagaaatacttgctattgagcactctctggtcctgagaccctgtctttcaaaaaacaaaaacaaggctaagtgtggtagcatactcttataattccagcatctgggagatgaaggtaagaggatcacaagttttgttgttgtttgtttttatttttcgagacagggtttctctgtggctttggacgctgtcctggcactcactctgtagaccaggctggcctcaaactcagacatccatctgactctgcctcccaagcgctgggattaaagggtgtgccaccaatgcccagctgttttttgtttttgagacagggtttctctgtgtaacagtcttagttgtcctggaactccttttatagaccagtctggcctcaaactcacagaggtccacctgcttctgcctcccaagtgctgggattaaaggcatgagccaccaatgccaggctcactgactggctcttttttaatttttttatgtggggtactggggactgaagatgaggccttacacatgttagggaagtgctctactactgagctatatccctaaccctgcattgttttgtttgcttgtttttttttttttgtggcaagatgaccttgaacttcttctgattctcctccctctacctcacccacacaggaattacaggtgtataccaccaagcttggcttatggagtgcttgggatagaacccagggcctcacatgttggctatgtagggaaggctatactatgtaagctatactatgtaagtctcataactaggcaagcactgtatcatctgaatcacactctagctcagccattttgagtaaagcaagcaccttaatttcctaaagcagaactgctggttcatattatagttttatttttaatttctcttgtgtcatttttgttttgcttttgtttttgagacagggtttctctgtgtagctttggaggctgtcctggaactcgctctggagaccaggctggccttgaactcacagagatcctcctatctttgcctccctcccaagtgctgcaattaaaggcatgtgccaccactgctcagcttatttttaatttttaaggaacaccacaatgttttccatagctgttgtgccattttatattcctactaacagtgcataagggtataagcttattcttttaaccaacttcctcaaaatatcaagaagcagctgggtggtgttgtcgcatgcctgtaatctcaacactcacaaactaaaggcaggcggatagctgagttctaggccagcctggtctacagattgagctctaagcagccggggatacacagagaaaccctgtctcaaaatataaataaataaattgctgtgtaccattttccacatagccccccttcctagctaaggcagagatagtcccagattcagtaaggtccagtttgtcttatacatattagaaaataaaacatgaacctcttcaggtatttctttcttcttcttaacctttttaaaaatttttttttgttaaccattttttttttttttttaagacagggtttcttagtagctatggagccagtcttggaacttgatctgtagactagtctggcctcgaactcacagagatccacctgcctctgcctcccgagtgcttcgattaaagaaaggcatgcaccagcacccagctcctttaaaaaacatttatttgtgtgtgtttgtgtatgcatgtatgcgtgcatgcctctaagtggagtatgttttttttttctttcaccaagtgggttccagctatcaaactgaggccatcaaatttgacagtaaattttcttatcttctgagtcattataccaacccatctgtttctatttgtaactttttatgtgcttttcttttccacctttctttctgttttcatttgattgtttcatatacaggtcttaatttataaccaaggctggcttgtaagtcactatgtagtcccagactgtcctcaaccttactgggtgctcctggagcccatctttgagagtctgtctcagggttttctttgtctcaggctcacctctgcctaaccatatctttgggactcagccctttactgtactccctgtccatgtcacatcccgaagcatgaggccctgcttctgtttgcttgcttttttcagtcaccttgttactttctcctctctgttaatttcctgtctgtcttgttctatcttcctggttctgcccatgtcagcgtttctgttagtgtcatcctggctggccttgatatttgtttctctctggccacctgctctgccactcatgcttattttcgtctctttgcaccagtgcctgttctgggatacaaacgagcattggtgaagctctgcattggccaagttacatctgaagactgagaccactagaactctgggaaagaattgcaaagaatgactttctgtcttcagctcaatccccatcctagtcttccaaagccagccttagttctggatcaaaagtcccttccccctttaagaccctccccaggtagagaacatcctccctttccctagcccgcaggattctcgtaccttggtagaccaacttggtcccacgcctgcctcaaccttgaaccgattgaaacactccacagaatcgcagcgccaaccacggtaaggatttgggatggggtgaagaggaagcccgcttccagacccacccaaagggccagccccagagccaactctcttgtcccaacaagccggactgggctccgccccgtctgggaactggccaccttcctgccctccccgcccaagaagggtggtgcttctgcagagcggacagcaccttggggtcctgaatgtggttggtgccacccgctccgacgagcagtagtctatcatcgagcagtttcctggacttagagaacagggttaggaggtttgctcgctcattctctggccccttctcggcagcaggaagcgaaacaaaaacagtcttctctccaggtcctcaggccctcctaaattatgtttgccgatgtgactgctcagaaaactcaaagcaatggaccttctgcacacgataggcagcacgattggtgagtgagtcctttcaggtcccctctggatgactatggagtggcaacttagaaaaatgtcccatgggcagaaattcgttaattttgctaccacatgaatgctaggaaagtactctattgtgtagatgaccgtcccccttccactccctccccagctcactgggggaaatactacagtacaatcaataaaactgagttttaaaacaataccagaattagtggtggcatatgcctgaaatctcagcacttggaaggcagaggcgggtgtattgatgtgagtttggggccagcctggtctgtatattaagttccagattagcctcccccccccaaaaaaaaagcctcgtgacgcccgcataataccagcacttgagaaacaaaggcaagaggattgctgtgacttcaaggccagcctaggttatacatagagtgtgaggctagtgtaggctatatgagactatactgctttaaatgcaggtggcagataaaagagaatctctggggcttcctggacgccaacctaggcggaaaacgtgaccccaggctcaataatagaccttatttcgaaagtaataaggcacagaatgatgaacacggacactcaaagcctttttcttgactccgcgtgcgccttcagaagcgtgcataatcagactcacacaggatggggcaggggaagagataatatgtaaaagggttccaccagcctaggccttgagttgcttcaggtaatcgtgctgcgcagctcttgtcactagaattaaggaaccaaagagggaggagctaatggcggtctctagcaaagatcctgacggggaagggggcggggcgaggcgnnnnnnnnnnnnnnnnnnnnnnnnnnnnnnnnnnnnnnnnnnnnnnnnnnnnnnnnnnnnnnnnnnnnnnnnnnnnnnnnnnnnnnnnnnnnnnnnnnnnnnnnnnnnnnnnnnnnnnnnnnnnnnnnnnnnnnnnnnnnnnnnnnnnnnnnnnnnnnnnnnnnnnnnnnnnnnnnnnnnnnnnnnnnnnnnnnnnnnnnnnnnnnnnnnnnnnnnnnnnnnnnnnnnnnnnnnnnnnnnnctgaaggagatgcccctccatgtgaagtggccgttccccgcggtgccccggctcacctggaccatagccagtagcgtcgtcatgggtctggtgggcacctacagctgcttctggaccagtgagtggccaaaggccaaggcggagtctgtcagaggctgtcagcctggccagagttggattttggtttgggtactgggggtgtggcagggtctctgctgacactggaagactccccgggcaggtcgagatgagcaagagcttgagactgacttctcttcccagagtacatgaaccaactcaccgtgcacaacaaagaagttctgtatgagctcattgagaaccgaggccctgccacccccctcatcacggtctccaaccaccaatcctgcatggatgaccctcatctctggggtagtgtgctagtgtgcttgggttcagggaggcaaaacaggaataggccccagccaaagacagaatagattcacttctcaccaggctctttggaaaaccatggcattgttcgtgggatacactgcctagctgctggaagttttatgtctcccttaggattcctccagaggatgttatttgcacaggatatcagaaatttagaagtaatgtggaagtggccatgtcacattaagggctttcctttttcctagggatcctgaaactccgtcacatatggaacctgaaattgatgcgttggtgagaagcaataggccccttgaagtggcccatccatttctgcccatatttgccttcctgctctgctcaggagttggcatccaagcagtccaggaagggcatgggtggggccccacaggcccttctcttgagtctcattctgcatgacagtgatgacaggcattgtactgggtggggagagttggggacagggactagaaaggcagggatgactgagtctgttgctgctctaggaccccagcagctgcagacatctgcttcaccaaggagctgcactcccatttcttcagcttgggcaaatgtgtgcctgtgtgtcgaggtgagctgctcctctgggaggcatgtccaggcctcccttgggggtaaggaagctagctggtggtcagtgtctttgtagtagaaggagccatggcatgacagtatgggtggcagagggaagggagaaggattcccacttagattctctgcagtagcctgaggattatccaggactctagcatgagaattcaaggaagctttatttgttgtcccttctctatctactactgctcttgtggaaaggagtgtggtatcatcactctatgatggcagtgcggtatatgtatttaaggccagagggtttgcttctgggagagcaaacagactggtggggtggggaacctgggattgaatgatcactcagtacttttcacaaacccctatgtggagaatggggatcagatagggctcatattttctagatagtagaagtccaaggtcatagactgactgatcttgggcaaatttagaattcagatccacatttccctttcctctggggaagcagatttcttttcaaaggatgaaagaaaaagtctaaaattgggcaaataagccaacgatagagccaggggggtggtgcacacttttaattccagcactcgggaggcagaggcaggtaagtctctgaatttgaggctatcctagtctacagacctagttccaagacagcctgggctacaaagagaaaccctgccttaaaacagccttgtatggtggcctatgcctatagtccctgtatttgggaggtagaagtaggtggtttaccatgagtttgaagccaacttgggctagagatacagaccctatctcaaaaaaaatgtgagcccatgtgtgtacacattgtgtgcccacatacacacatacagagaaatcaagggctggaggtgtggcttgggtacagtttgtagctagctggcaaagaaccctgagtcctatccccagcatcacaaaaagtataaaacaaaaactagaaaatgaaacattaatttcaaggacaacaaagataatctaatcactagttgggaggcaggtgattctttgtgagttcaaggccagcctggtctacagagcaacttccaggaaaggctccaaagctacacagagaaaccctgtcttgaaaaacaaaacaaaacaaatgataatctaattacatgtgagtaaaacatgtgttgtgatactgtttctgtgttaaacaaccatttttctgtaagcctaagactttgtaggttgacctttaagcactgaagtgattttacacaagtagaaatagcatttgcgccgggctttggtggcgcacgcctttaatcccagcactcggaaggcagaggcaggcggatctctgtgagttcaaggccagcctggtctccagagcgagtgccaggataggttccaaagctgcagagaaaccctgtcttgaaaaaacaaaaaaagaaagaaagaaagaaagaaagaaagaaagaaagaaagaaagaaagaaagaaatagtatttgcaaaagttaaaaaccgtgagctgctgttccaaaggcatattatcctttttactttccagtttcaagctcatagggtatatgccagtgggttttggtagaggcgcaaacacctttagtgaccacccttggtatgtactaccatcccaagcaggttccttgtatctctgttccctgaactcattcccacttctggctcctgagtgagctgtcagatcaggtcccttttgaggttgggctgaacccctaatcacatcttgtaaacaacaggcttacagtgagtagtgaaaaggcagttcttagtgtactgacctgagatagccttgatgttgctttgtctcctgtgagataccctccaccccattttataagactaggatatttacccatcccttccctttcctggttctgtccaccctatggttattatttcactattgtggagagtcttactatgtccagatgactcaaggttgctagctagcaaatgatattaggcctctacatctatagtgtggctgaaagctgggctgcttggatgacccaggtttgcactgttgcctttcctcaatccagtgtgatcatcttagaatgtctctaaggttttactagcctcagggcagcttgactcctgttttcagtccccctcccagacctttttgtttgttttgtgagacatggtctcacataacacaggctggccttgaaatactgattggtccatccaagtttccctgtctcttctgtgttttctgtttactgaagtgttctcccttggcccagaaaggtcaagaaaggttgaagcaatgtcatccaaagagtagagaggcccaggagctgatctggagccagcaaatgggtgtgctttgggaggggtaggttccagcagaacaggccataggggcagagggagatggaggagttaccatgttatcatttcaataagtgatactgtctagccaggtgtcttgttgcatacccgtaataccagcaccgggaaagctgaggatcagcataactttgaggccagcctgggttacgtagtaatatctgtctcaaaaaagaaagaaggtgctatttatacatgacatatactaagaggttgagaggacattgttttctttggttttgatataggatattactctgtggtccatcctgacctcaaactcaacagcggctcttttgcctcagcctcccaagtgctgagattataggcgtgagccaccatgcctatcttgagaggaggatatggttaaacaaaaaatgtgaagggtcagggtagcaaggagtaacaggctctggaaatagtcgttgaaggtatctatggatgatgatatgggggatgaactgttgcctccatcataatgaggatggatctggagtgggcctcaatgtgtgaatctaattcactgaggtttggagagcttggtatctatcccagagaatggatcaaagagaacagacctttctctgcaggagatggtgtctaccagaaagggatggacttcattttggagaaacttaaccatggggactgggtacacatctttccagaaggtcagttgggtgcttggtcggttgggtgcttggtcagggtcctctagcatgcgtggtttcagtttccaagccttgtctctgtgttctctcactagggaaagtaaacatgagttctgagttcctgcgcttcaagtggggtaagtgttgctggccaagctgacatagccaagttccccattcaaaggtggccctgtgggtccctggctttattcccctctggtgggtgtgtcaggaaaagtgggaaggggacagctaggagtcaaggactattctttaattgagagacagtagaagtggacactggccagattagcagggaagcttggcccaaaatgtttctgcctctctcctaagtaggaattgggcggctgattgctgagtgtcatctacctcccctcaccctgccactatggcatgttggtgagtcaggggctgggggtatggaggggatttccttagatgtttttaaggggattgtgggttgttggatggctgagagaagtgcctgcctggggctctctctggtaccctggtacactgcttcccccaatggctggctttctatccactgtgctacaggaatgaatgatgtcctccctaatagcccaccctattttccccgatttggacaggtgggtaggcactgctgacccttgtctatctgtctacttgcctgctatctgccctatgtctcctagcttgtaatataaaggattggttgaggatttgctgagcatgagcatgtagtgagggtggggtagagttggtggggcttttctggaagcaaggcctttagaataagaattgaaaattgggtggaagtgcgggacaaggtggagcaagacagtcattgataggatggataccaggataaggctgttccttggataccaccaggccccactgcctgttttgaagagggggagtggctttcaggagcaccaagcccattgggcagggcatggctctgactccccacattgtttgggctggaaatataggctccttgtcatccttgatggcctgcctccttacagaaaatcaccgtgctgattgggaagcctttcagtgcactccctgtgcttgagcggctccgggcagaaaacaagtcagctgtgagtttccaactaaggtcccctagctgtccttgaccttcccagcccctcagattcccagggtacctcagtcatagtcactgaggagtgcaggccagcaccatccttgctctcaggtggagattcggaaagccctcacagacttcattcaagaggaattccagcggctgaagatgcaggcggaacagctccacaaccatttccagcctggaagataggctttgcctacccagtctgtgccccaaagtccttagccaagggagcattgggccctccagggtttggaaagtggtggtacaggaccctgcccaagcttgcttggctctgtactgcctttgagtttcttccctgcacaaaactgaggctgggagatggaccaatgcttttaattcagatagattggctcataatccctgcttttctttcttcgttttgttttgagacagggtttctctgtgtagccctggctgtcctggaactctctttgtagggcaggttatcctcaaactcatagagatccacctgcctctgccttcagagagttggaattaaaggtgtatgctaccactacctggcctgaataccctttcttatccttgagcatctgactcctctggatctcttgggctaaaagaaaagccttggatgtccctcacacttggcagagaagggaggaagacttttaggcaggggctggcattggaagggagcaaagcaggcagttgagtgcctagtaggagaataggtgtcatggccattgatgcagaaagagtacccaaatggccccttggatgggctaccacctgcctacctttgcccaggagctgctcacagcctcctcagggatggctgtcaggcaggtcattcttccacctgagcttctcccactgtaagatttgtgcttgggtggccccagacaagagcaagtcttggccaggattcaagcccagctaaacttaactagatgtttctgttagctggcagaaaaagggcccctaagacctgaccatgaacacccccccatatcagggcctacccacttctctaacctttttgctttgacatcccctatgtactgatttcatgtttttagagtaataaaatatctgtgttataccactattcctctgtcttctgtgtaggaatgctgagtactgagaagtactttgctggacaagtaaataggacccttgagtctgtatatagtgagatcatttaaatagattgacattggtatctcactgtacactggccactcaagacatccattatcacctgtaagccccatgacaatgtggcaggagtagagattcataatagtggcaaaacaagattaataaagtagcatgaaaacctcaagtgaagtcagacatggtagtacacatctgtgatttgagcattagggaggctgaagcgggaaatgttgccacatgttcaaggttggcctgtgatactaaatgagagattaaaaagaaaaaaattaagtcaaccatgggaggcagaagcaggcacccttgtaatcccagtacctgggagaaagaggacaacagatctctgagtctgagaccagcctgggccacaaaacaaacagtttcaaacaaatagtaaggcaggcatggtgacaaataccaataatgcttgcattttggaggtggagtcagtaagagtaggaattcagataatccttggctatgtagcaaattcagagcctttctgggctatctgaaaccctctcccaaaaaattaaaaaatgaatataaccttcagccaggcatggtggcacaagcctttaatcacagaactctggaagcagaggcaggatcagaaaaattcaaagttggatgttggtggctcacacctttgatcctagcacttgggagacaaaggcaggtggatctctgagttcaaggccagcctggtctacagagctaattctaggacagccaggactattacacagagaaaccgtgtctcaacaaacaaaccaccaccaacaaaaaacaacccccctctcccccaaaaaaaagaaaaaagaaagggctgaagatgtggctcaatgagcacttacttagaatgtgtgatgccctgaagcctgggtttaattccaacccttaaaaaatcaaaaaataaaagaaaaatgttgactaaagagaggaatacccccaccccaggaatgtgtccgtccttgtgtatatgctggtacaaatgtgtctgaactcattatgtagccaaggatgacttgtaacttctgcctctaccttccaagtgctgctgattacatagctgtgtcaccatgcctggaaaggtttataactcttatttttattttatttatttgtatttattgttttttttctgagacagggtttctctgtgtagtcctggctgttctggaattcactctgtagaccaggctgatctcagactgatctctgcctcccaggtactaggattacaagtgtgcgccaccacctcctggctactctcagtttttaattttgagtcaaggtctcacttagctcaggctggccttgaactccttatgtaatcaaagctggctttgaatcccttatcctcttgcctccaagtgctggggtcacaggcagttaccaacatgtccagatgagtttattactttttggttttttgagacagggtttctctgtattgttttggaggctgtcctggaactctgtagacctggctggcctcgaacttgcagagatccacctgcctccgcctcccgagtactgggattaaaggcgtgtgccaccaacgcccagccccaacaaacactcaaacattcttatgttatttttttactataagatgtgccaaataaataatgtattagttccctagggtgctgtagcaaagtgtcacaaactagctagcttaaaacaaaacagttctgttcttgtttttaaagatttatttatttaaaaaatgtatttatttattgtttatacagtgttctgcctgcgtgtatgcctgcaggccagaagagggcaccacatctcattacagatggttgtgagccaccatgtagttgctgggaattgaactcaagccagtgcttgtaaccgttgagccatctctccaacccaaaacatagttcttttctgataattttgtagactacaagtcgcaaatcagggtgttggtggagctgagtttgctctgaaggctctaggagagagttggttcttgcttctctcttctcaattcctgatgagggaaatctttatatatccttggcttgtagctgcattatggcagtctgtctgttcatctgtccttctgccctgtctgcatctatgttttcctcttttgcctagcataatggcatgtgacatttagaggagttgaaagcaggaggaccaggaattccagcactgcctacatagtgagtttgaggccaccttgggccatgtgagtccatcacaaacaataaattccttccttcctttcttcctcccttccttctttcttttttgttggttttttaaagacagggtatctctgtgtagctgtgaatccctggctggcctgggattcgctttgtggaacgagatggccctgaaatcttagagatctgcctgcctctgcctcccaagtgatgggatttaaaggcatccaccgacaccactcagcaaatttccctcttatcatattataatgacagcaatcatcagactgtggcccatccttccatattccgagtttagcagtcaatatgagtttattataaatggattacatatgcaaagtccttgtttccaaactaagatgcatttacaatctcttgggggttgcaacccacagggtgagaaccgctgtcctagattaattacgtctggagagttcaagatttggttgtactcttcctttttcttttttctttttgtttgcagtactgtgggaatgaatttagcatttataaagtaatcaacagactaggaaataaaaatggcacggaaatgtgggcatgtttggtggctcacaattttttttggctcacagttgtaatcctagtacttgaaaggttgaggtttgcatagtgaattttgttcataccacaactctgtctcaaaaaaaatcaatttatttatgccagtgacttccattttctgtcagtccttcctttaaggcaaatcactcagaaggaaggataatcctcccacggggagtctcccctaatttacagtgggatcttccttggcaaagttggaaagtgttgctaagtaaaaaaaaaaaaaaaaaaaacagtgttctgctctcatggtatttattacctgccttttagtggcgaatgacactgacattgttagttaatgttctccttcagacccggttaccgcctgggttttcccctcctttctgaaactgcatttgttctctttttctagatccttttcccttctacccattttaagctctgactattgttcccctgatggtacaatggaccctcttctcattctaagggattgcagttttcatatgtaccagacagagggtctatttttagaaaaaagatccagtcatgcgactttaagacgaaaacagaaaaagacaaatactagagaacagggctctgtctccccaccccgcctagctgagctaggtagcagctggtagtgctcggccccccgcctcctttctcacaaggagcgtgcgcgactggagacacgtatagccaaccagtgagaaagagtggtcatgagtgccaggattttgacccaattagaggannnnnnnnnnnnnnnnnnnnnnnnnnnnnnnnnnnnnnnnnnnnnnnnnnnnnnnnnnnnnnnnnnnnnnnnnnnnnnnnnnnnnnnnnnnnnnnnnnnnnnnnnnnnnnnnnnnnnnnnnnnnnnnnnnnnnnnnnnnnnnnnnnnnnnnnnnnnnnnnnnnnnnnnnnnnnnnnnnnnnnnnnnnnnnnnnnnnnnnnnnnnnnnnnnnnnnnnnnnnnnnnnnnnnnnnnnnnnnnnnnnnnnnnnnnnnnnggggtcgggctgggccgggtcgagttgagttgggccaagtggggtttaggagggctgtgctgtgcgccgcggtggatgagtcacctatgctgaactccagggctgtccttggccgggtttcgaggcccagatggaaactgtctcttactcaggggcctacatgaagccgggagctcatgggcttaggatctcaacccacacaatcacatctgacgtgtctcttccgtccacttctagggacctgtgggctcctatggtcgacacacatgagggtcatattaccagcaatatgcagctttctacctacttagaccctgccctggagctgggcccccgcaatgtactgctgttccttcaggacaaggtgagtctactccagtctgctatgtctttttgttggtaatcacaccccacctcaccctcactgccatttcccaggtgaagctgtagtgaccttgtcccacctgtaggcaggtgtggctagattttcttgaagacctgtaagagatgcttcagtgggaacaggatacccatgggaatggcagggacttgatttaagggagcaaggggtcaaacattagatacttaactagtactaagcattattttctggtgttctgtagcatggtggggattatcactcagtttcacagatgagaagattcactttgggggaagatcaatgtgacttgcccaatagctaatggttggcagaactgtaattttaaatatcacaattgtaatatttttttttggtttaactgctaaaggaagtaatattgatgaggtaaaattaattgctgaaggcccagatttggagacagtacaacacactgcttctagttctgggggtatcagtcctgtcccccagttttgtgctgggccagcattctattttcctttcattccaggtgtgtgcacccagagcaggattatggactatgagaaggttctagctcagcataagatcattgttcaggaggatgtcaagtctctacttgtcccttcctctttagtggcctagttggctcattttgtttgtggcctccctctgttgctgtgtctgctggtggtggtgattatgttggtcaatagtctttttgaaaggtggtaaataataaagtcagactgttaactcagtcctaccacctgtttcagccttggagaacatgaaataatctttgtaaaccacagtttttacacatgtgaaatgaaaatatctacctatagcaggggactgagagaagtaatctacataaatcctctagccacagtctcccaatattagggtatttccttcttttgccaatgatagagtgcttagtatgtgttaggaagtagacagtcttgtgaagacaagtggttaagagctaaatttgaagccaggtgcatacctgtaatcccagaacttggaggcagaggcaggtggatctcagtgagtttgaggccagccaggtctataaagcaagttctaggacagcctgaactgttacactgagaaaccctgtctcaaaacaccaaaaaaaaagggaaaaaaatagctaaatttgagccctgtgctagtgtcgcatgcctttaatccatcccagcactcaggagatagaggcaggcggatctcagtgagttcaaatcctggtctacagagcaagttccaggacagctggtactgttacacagagaaaccctgtctctaaaaactaaaaaaaaaggggggctggagagatggctcagaggttaagagcactgactagtcttcaggaggtcctgagttcaattcaaagcaaccacatggtggctcacaaccatctataatgaggtttggtgtcttcttctggcctgcagcatacatgcagacagaacactatgcgtaataaataaataaatctttaaaaaaactttaaaaaagagctaagttggtacatgatatactgtcagtcctttagagaaggaagcaggttaaggcaacacaataacaaaggatactgctttagataacagtgtgatcaggcagggtctcatcttgttagtagtagggagtcatgtgacttttgaggagggacattactgtcaggaaaacaagaggtgtaaaggccctgggcaagggagtgctcttagtaagttcaagggagtgcttatgtgatttggaccctagagagtgattgaaaaggaacgagatgatctgccaggtcacctagagatggagcacaagggcaaaggttggtggtagttctgagtataacaaagccttgtatatgtagtgccgagtataggagagtatactaggaggggaggctagaaaagaaggatgggcttatgtatagtaaacacaatgagtttagggaagctggttaagattccttctgggcctaactgggaaaagccagaggaagctagctgggaatgaagggaggaggggtaagatacttgtagattgtagagggaagggcatgaaattggagttaatgggagtcctgggagctcagaagttccagtttcctccattgtgttccaatattttcctctttcctaactcccaccaaaaatggttggataaggacttcttcccttgaaaaaaggatcctgtccacactggacatagaggttctctttgctctgacttctacttcccacttaggaggcatgtaataaatgttctttgctgtcctcttcctctttccagcttccctctttcctccctacttcttgctgtgtggctcttgctttgtaggttatcataagctaggtttccatagatttcccaaccctatgaccacgttcagtgtcttgtcaccctgccctcagagtgctggggaggaaagaatgagccttccactcacctccaccacaagtgctggtggttcactctcctcctccatgtcaaatatgacttataatatatttggccctgggaatccccccactgcccttagtccttgttccttgcccagccttctggtgacatctcttctacttctcttttagttaagcattgaggatttcacagcatatggtggtgtgtttggaaataagcaggacagtgccttttctaacctggaggtaagggtctgctcacagccccagctaagaggacagaaatatactctgtgctctttttcccagagagtaccagaggcttttgagggtagatggcctgggatgtgagtgtcaaatgtgggacataactttctgacccattgtgacatccctaaggggtatggcttttcaggcaagtttttttgtacttattaggttcattgttccctggattattttacctttcaccttttccctgccatcagaatgccctggatttggctccctcctcactggtgcttcctgctgtggactggtatgcaatcagcactctgactacctatctgcaggagaagcttggggctagtcccctgcatgtggatctagctactctaaaggagctgaaactcaatgccagcctccctgccctgctgctcatccatctgccctacacagccaggtacagcctgggtggcatagcctctagccttgcacttcaagagatgggtaaggtcctgggctctgagctttggtggcagagttgagccaaagatgacaatattctcctgtttactacattgagactcttccagaaagttccttgtatgcccagaagagacaggaaggacttcctcttaggctgtgacttacaagtatccactactgagttattcctattgggcttccagaaatgaggcagacatggtccctacttgtagaaaacttcttcacccaatgaggccctctttataaaactggacagggactgtacctgcaaactggtgaaagggaaatggaattccaggtagggatactgaagcaaatagaggtatggggtggaggagggctaattgctgctgagctgggcctctgcatggctgtcagggcagcagctgaagtgcacaggcttggtgagtgcagctagtggggaaggagatgctagaggggttgagagaactgctccaggcaagctgtttggatttgagggaaaaagcaacctgagggcctcttattttcttatccttagctccggtctgatggcaccaagggaggtcctcacaggcaatggtgagtgtggtcccaggaaaatagaactggtttctcctcactacaagggtggccccctgtttctcagagtagctgacagctgagcagggacatagtggctgcctgcctggccatgttcttctgtagctagcttcacctgatagaggtgccttatgacccttgtgcaagagccctgtaatctagcttctgcacaggtctaacaaatctatggatttaatagaccagtaacattatgcaaagcaattaggaggacttgtctttgtagtaggacttgtctttgtagtaaaggacagtctatctgcatggaaaagaatttgggtagatctagagttctctgtatcactatatgtttcacttaggttgggcttggcattggagagtccatgattgaggccacaattgtccccagagagactggtagagggggtagaaggagaaatagctggttttaggggtcttcagtggaaacaaatagcaccgaatttctcaaggtctagaaggtctctaaagcagacagtggggagtatttatttaagcagactacctggtgacttggctctctgctctcctgtcacgcttcagatgaggtcattggacaggtactgagcacactgaagtctgaagatgtcccttacaccgcagctcttactgcagtccgcccttctagagtacgtactcttctagcaggggccctggggcatggggttatgaggtcattggtgagtgtgcctggagatgaaagggtatgtcataggcagggcctcccaggagtccttatcttgggagattagtgggcaaaggattgctttctcaattcatggggactttttttcccatcttgggcagtgttcatgtgtacttgctgcaagtgttcataagtttagggagatggaacatcagggctagggactttcagctcacagggcacccagtgggaagggagactgttacaatggattaggctttgtttttagggctgttgagagaaggcttgttggatatttctgcaggtggtccgtgatgtacccatggtggctgagggtctaggtcgacagctgcttcagactcaggtggcatcacatgtgatccatcctcctgtgagttacaatgacactgccccaaggatcctgttctgggcacaaaacttctctgtggcatacaaagacgagtggaaagacttgacttccctcacctttggtgtggagaaacttaacttgactggctccttctggaacgactcctttgccatgtaaggacactaggcagggaaggaaggactgtgttatcacatatggccttcttgccactgtgagcccagtacagggcaagaatgtagatcaggtgtgtctatgttgggggtgaagaaggtctgttcaccaaggacttgaagatagtatcacggggtaatgttactgggaggttactggagaggaagcctcacaagttttacctttccatgctttttaggccttggttgttgggttctgggttattaccctcacacagtcccttggaaccctagcgcttctttgaactcaacccctgggactacatgtgagcaaatagcagaccagccgccaaaaccagttctaggcttcctatacctgaaacctcagcaggcagctgaataaccttaagaaggggatgaaagaggctcaggggactcaggagaaccagaggaaggaatcctaagctggagatctgggacctaggtgcagatcccccaactgttcctgatttgcttatgactggagccttagttttcccatcagataaatggggacactgtagtggaatgtcactgtaaggatggatttaggacagcttagattggacccagcctgaggagaaccatactctaggtccttctagagcctgacagcacccctctgccttgtcccacaggctttcactgacctatgaaccactctttggtgcaatggtgacattcaagtaagttctggtggttgaagtgtggcttggctggtatgtctccattgtcttctgttcatctgacaatctctgctaccctcacctcccaggttcattctggctagtcgcttctacccagtgtctgcccgatactggtttactatggaacgacttgaaatccacagcaatggctctgtttcccatttcaatgtttcccaagtcacgggacccagcatctattctttccactgtgagtatgtcagcagtctgagcaagaaaggcaatctccttgtgaccaacgtgccctcactctggcagatgactcttcaggacttccaggtattaaagggggaatgggctccaagctggtggcagtagggggagggaagaagagcccagagaatttcagtatggcttgagcatgtagctgagagttccatccttatgctgtctctgaaggtctagactgttcactgattccagaaccccagcccttgttgtctgtagaaacttgtggtcccttctgatccatgtctatgtgtctcctagatccaggccttcaatgtgacgggtgagcagttctcctatgctagcgactgtgctggcttcttctctccaggcatctggatggggctgctcaccaccctcttcatgcttttcatcttcacctatggcctgcacatgatactcagcctcaagaccatggatcgttttgacgaccacaagggccccaccatcactttgacacagattgtgtgacctgtgccagagagagattgagggagtgttggtgtctaggttgtcatgtttgcatcttgtggcatagtggatagaaagttttttttctcttcgatagcatgaaccctgcagtaccctcagcctgtcttgcttcctcttcaacctactgagggactggcttccctggggctatcccccatctctaccaacaaagtgtatatattcttcatagatattagacaaatcttccaggctccatcatcatgaggggaaggaacattaattctagggttccctttctccctttcccccttatttattcttgcccctccgctacttgctgtttatagtgcttctgtgtaattaatgctcactccccaagctttatgaatcttccagcaacagcaataaacttgaggttccttgagtttgagatgtatggaaagactacttaactgtctgtccagcttggctgttgtgttttttgggtgacatgttaagaatgatctgtacactggggtttatttctgtagcctgagaaagaagagacctccacaaggcttattcccactaggattgtctgccaagagatggggatgggggtactctttttgtttcccttcctaataaaataaagacgtgttgtcatatgtgttgggcttcggctttgagtcactcatttctgcacttgacagtagatttgtttttgactgaggggaagaagtgcccaggtgtagtcctaacaggtgagaggggaagggtgggagagtcttcatcaagctgattgatactcttaacgagttaaggtagaggcccattatttctcctggccttggggagagtccttacaatgaaagatacaggcaactgcaaataccacagggccttgctgtttctcccagaggggcggtatgggatcgcgccaggagggatgggacggggcggggcgctcnnnnnnnnnnnnnnnnnnnnnnnnnnnnnnnnnnnnnnnnnnnnnnnnnnnnnnnnnnnnnnnnnnnnnnnnnnnnnnnnnnnnnnnnnnnnnnnnnnnnnnnnnnnnnnnnnnnnnnnnnnnnnnnnnnnnnnnnnnnnnnnnnnnnnnnnnnnnnnnnnnnnnnnnnnnnnnnnnnnnnnnnnnnnnnnnnnnnnnnnnnnnnnnnnnnnnnnnnnnnnnnnnnnnnnnnnnnnnnnnnnnnnnnnnnnnnnnnnnnnnnnnnnnnnnnnnnnnnnnnnnnnnnnnnnnnnnnnnnnnnnnnnnnnnnnnnnnnnnnnnnnnnnnnnnnnnnnnnnnnnnnnnnnnnnnnnnnnnnnnnnnnnnnnnnnnnnnnnnnnnnnnnnnnnnnnnnnnnnnnnnnnnnnnnnnnnnnnnnnnnnnnnnnnnnnnnnnnnnnnnnnnnnnnnnnnnnnnnnnnnnnnnnnnnnnnnnnnnnnnnnnnnnnnnnnnnnnnnnnnnnnnnnnnnnnnnnnnnnnnnnnnnnnnnnnnnnnnnnnnnnnnnnnnnnnnnnnnnnnnnnnnnnnnnnnnnnnnnnnnnnnnnnnnnnnnnnnnnnnnnnnnnnnnnnnnnnnnnnnnnnnnnnnnnnnnnnnnnnnnnnnnnnnnnnnnnnnnnnnnnnnnnnnnnnnnnnnnnnnnnnnnnnnnnnaattcagggaatgttccagaagcagcagtagtgggggtagttacgacattccctctaccccagtctggtttcccatggagatctcaggctgaatatatcctctgcctttgtccttgggctagtgacagtgattggttgttggtttgcaccctgagtctggaccggtagatagggctggagggtcaggggctcctgcctttgtaggaggagcagcccagggtggggtctgggatttcatttgaattggttcttctccagactcgttacctttttgtgggctcagagcaggcagatacttacttggcttgtgggtactagaagactgtccttgggtctgctggaagctctgcctccctaagcctcatttaatgctctggcattccacattcttgcccaacagggttataaaggaaacatcgaatgaagccatttcccctctctccagttttaggtgctacaagaggcagggatttatgttacaaaatttatgtcgggtttgagtcagggacaaaccagggatgcaggtcagaaggcagatgggagtgtagctgcaaatgccacccctcccccaggaatgcatcttgtctggcatcatgtctgtgaatggaaagaaggtgctgcacatggaccggaacccttactatgggggtgagagctcttccatcacacccctggaagaggtaaggcttcttggacttgagctaagacccagacccctttttagtctctcacataggggcatgggggcaaagtagttcccaggtgctgggctggagaatgggagagggataggtggtccttgacatttttctttctttctgtcctgtttacagctatataaacgttttcagttgctggaagggccccctgagtcaatgggccggggccgagactggaatgttgacttgatccccaaatttctcatggccaatggtgagggagattaagaagataatgtatatggtgattggtgggtggtggtgattgggaagaccagaggggaggttcaagctccagaataaggtcagtcagacaactgagagatttttgaagggagctacactgacatccctaatcctctctggacacaggtcagctggtaaagatgctgctgtatacagaagtgactcgttatctggacttcaaggtggttgagggcagctttgtatacaagggaggcaagatctacaaagtaccatccactgagactgaggccttggcttctagtaagtatgagtctccttagccagagaataatgggacaggaggaagcagactattctcaagatagttaggcaaaaggctcccatttgcctaagcctaatcttagctctatgtaataccagaggccccttgctttatagtacctttattggaatgtgctacccatcctggcaagttaccagaaaggaagctcattgaggaggatttctttttggcagagggcctacttgacccccattgcatccccaagtggagctaggagtgcctcttcctacaaataggaaaactaaggccaagaagggtggggcagggttacatgactgagctctggtgggagccaggacaccaactttcctggcctgctctggtggaaagaagagttttatgtcccagtaatacaaaaagagtcttttcaatacccttccttcagatctgatgggcatgtttgaaaaacgacgcttccggaaattcttggtgtttgtggcaaactttgatgagaatgaccccaaaacctttgagggtgtcgacccccagaccaccagcatgcgtgatgtctacaggaagtttgatctgggccaagatgtcattgatttcactggccatgccttggcgctctaccgcactgatgagtgaggggaaagctggctggtggcaggagcccctttgtctgcctcccactttatcctccccacccctgcctattgtatccactgcccaccctgcatatctcttgtacttgtctataagttcacctgttgcatttccatccctctcttccatttgactcatatctttgccaggtcacaaagggtggtgggaaggcggatggtgtctttgaaggtgagcaggagtgctgctgtcaaagcatcttctcttgttccccagctacctggatcagccctgtcttgagactattaaccgtatcaagttgtacagtgaggtcctggccaggtctggcaagagcccatatttgtacccactctatggcctgggcgagctgccccagggctttgcaaggtgaggacctttttttcccaagctggcattagtgggtatgactaagaccaataagcctggtggtggtggcacaagcctttaatcccagcatttgggaagcagatgcaggcagagctctgtgagttccaggccaagctggtctagagagtgagttctaggacagccaaagctacatagagaaacactcttgaaaaaccaaaaataaaatgaaataaataaaagaatggaaattacctcctatggattttttttttttttcttgagacagggtttctctgtatttttttagagcctgtcctggaacttgctctatagatcaggctggccttgaactcagagatcccatctaaatcttcatgtacattgttccatccctggttaatgggggcacagccttagtacagagtaaaggtggagagttggctcagcagataaaagcacttgtttttacagaggacccaggtttaattccaacagccacatggtggcctacaactgtccataactccagttttagggaatcctaacaccttcatctgacctccataggttccaagcatgcatgtggtctacagacatatgccaagaaaacacatacacgtaaaatagtcaatgtaaataatatacttaaaaagtaaaggaaatacaaagtaaaggaccagatgaccatgaaaatagctttcccagttcctggtagtacctgaactaagtctaggaccccagaaccttgaatctaagattccctggaatctggctctttgccagagagtcctttattcgattcctgagccatttctatgtgaagctacactcattggactttgcagaatagaatgttctggatggaaactccagagaggaaggtgtatgccaagatgggccctcagttcattcataggagggacacctgaaacagttggagtcaaattctgtctacctgggcagttttctccatctcataggtagggtggggagagtacagtagatttggtccccattgtcctaagacttccccatcattttccttactatagattgagtgccatatatgggggaacatatatgctgaacaaacctgtggatgaaatcatcatggagaatggcaaggtggtgggtgtgaaatctgagggagaggtaagcatatcctgtgcatttgttaccatggcttgggtaaggtttggtcttttttagggatatattcatagggagccttaattgctggtgaatttgctgttgctgaaccctgagagcctcatagctaggaactgggtggtcaataaaagtccacatagctattcctgttggcaagaagtatccttcacgacctggagagatggctcagaggttaagagcactggctattcttccagaggtcccaagttcaattcccagcaccacatgatggctcacaactatctgtaatgagatctggtcccctcttctggcctgtcggcatacatgcaggcggaatgctgtatacatagtaaataaataaatcttaaaaagaagtatcaaattgccaggtgtggtggtacattcttgtaatcccactactgggggtgggggcagaggcacatggatttaaatcaatcaagaagtaaccttcagaagtcacatgctgtgtctatagtcccaaaagcattttttgtttgtttttttgagacagggtttctctgtggctttcgaggctgtcctggaactagctcttgtagatcagactgccctggactcacatagatccgcctgcctctgcctcccgagtgctgggattaaaggcatgcgccaccaacgcccagcctaaatgcattcttttggaaagggtgtcatgtatcccaggctggcctcaaatagtctatataggtaaaaatgaacacttaatccttgtgcttccttccaccttcctcatgctgggattacaggtgtgtgtcaacatacttggtttatgcagtgctagaaatctaatccagggttttatgcatgataggcaagcattatactgagacacatgctttaccaccccccactcccggccaaaaaaaaaaaaaatccttcagcctggtgtggtggggcatgagcactgaggtggctgagggaggaagatcctgagtttgagattagtttgggccaaatagactcaaacaaaaaccccataaacagcaaaaaaaaagtgtgatcattgtgtttcagcagtagggttacctagtcctgtatgtgagggatcacttctgagcttcaaggaagggattgtgttctataggagggatggtgatgacactcagagctgcctggctttacattaggctcagcttactattacccagggcaagtggtgatctgacaggtacaaagcctctggtgccttcacaggtggcccgctgtaagcagctgatctgtgaccctagctacatcccagaccgtgtacggaaggctggccaggttattcgtatcatctgtatcctcagccaccccatcaagaacaccaatgatgccaattcttgccaaattatcatccctcagaaccaggtcaacaggaagtcaggtaggtcagtccatgagggattaccttctgttgctatgtctctctcacaagaagtcttggggctccttgtgacattttgttatggaatatgtctgggattggatgggccttttcttcttcatgagattgacagtttggatgctgtctgcatgtagggctggggaggggcaggtgggccagattcatgtccacttcgtaggaactacctttttgtgttgtcatttcccttggcacatgttaactgagtgcttcctgtggtcagacatctatgtgtgcatgatctcctatgcacacaacgtggcagcacagggcaaatacatcgccattgccagcaccaccgtggagactgcagaaccggaaaaggaggttgagcctgcattggagctgttggaacccattgaccagaagtgaggggctgagccaaactgggcagactgggttgaaaaccaggaatgggcaacacccattgtgagactttaatgtactgttttccatttgcccctcaggtttgtggctatcagtgatttgtatgagcctattgatgatggttctgagagtcaggtaagaaacctgtcccagtcagtgctggctgttgatgcccacccaagatcctctgcgtgatttccctgagccctggggttttgcctatttacaggtgttttgttcgtgctcctatgatgccaccacacactttgagactacttgcaatgacatcaaagatatctacaaacgcatggctgggtctgcctttgattttgagaacatgaagcgcaaacagaatgatgtctttggagaggctgatcagtgattgctgactcccctcctccagcccctgctcccctttccccaacctgtatgtcctttggggcagggaagatggtatggctgggtatccctgtttccagcatcttctgtttcccccaccacattctgatcacttaccttgttgatttgattcactgaccaaatccttaaccttagtgatggtttgggagatgggggttgggtagtatcctctttcttggttctaggaaaagaggattcctgtgtgtgagcacatgtgctcacgagtgtgtgagtgtgtgtgtgtgtgtgtgtgtgtgtgtgtgtgtgtgtgtgtgtgtgtatacacgtgtacaccctaattctgctgtttgggaaggagtggaggaaaagctgactctgcccccactgttcttactcctaatgtagtggcctttggagataccccatctccacccccaactcttatgtgttggagagaaggggccctcccagcacaaaattgcattcctcttcccccttataatttattctaatttattaactttgacctatctgtctgagccttcagcctttctgtgcagcctggggctgtagagttagctgccctggcctttcccatccctggcaaagtctgggttgggtgaaggtttatgtgtggccccctttgggagttgatctatttttaatttcttgtctttgtgttgtgttctttgagaaaacgtaaatgtgagcaaagcagaaggaggtgggaaagtggatccaaaccccagtgtgccctgcccaatgccttttcctttagtggttggaaacccttatcttgcaaagtgaatgtgtccccttccccaacctctagtgtatttcaaaataaaacccctccaataaaactgttgaaacctgagtctggatctttaggttctttgctaaaatcaaaggttgttgagttgttttgcagtattggagcaatttagcttctggaattagaactatatcctcaagagtcaaggcaggtgaggtaggtccatcatcagctggtgttgagtggggtcatttttgcactcgtggtttctttctcttttttttgagacagggtttctctgtggctttagaggctatcctggcactcactcgggagaccaggctggtctcaaactcacatagatccacctgcctctgcctcctgagtgctgagattaaaggcgtgtgccaccaacacccagcttgcactagtggtttctaatttcttttattatgtatacaacattctgcttccatgtatatctgcacaccagaagagggcaccggatttcataacggatggttgtgagccaccatgtggttgctgggaattgaactcaggacttctggaacagcagtctgtgctcttaacctctgagccatctctccagcatgccctagtggtttctaagtcagagaaaaggcatctaggtttggagactgggttcaaggccattctgggtgctcagaggcagggcagcacaggtgagatggctcaattagtaaaggcactttccaggcaaccttgaattagatttttggatcccatgtaaaggcaactccacaatatgacgtctgcacattattccatggcttttgcacacacaaacatatacatacatttaatatttcatgtgtatgggtattttgcctagaccaatgtgcgttacttgcatgtctgctgcctgcaaaggtcagtagagggcgttgtgagatgctatgtaggtgctgggaattgaacatgggtcctctggaagtacaactacacatcataaccactgaactaactctccagctcctcaagaggagtgtggatcaggagctagtctcagtcctggggaagcaaagggacccatacctagcattggatgatagcaaaaaatccaagcagccaaccgagaggtggtggctcacgcctttaatgccagcactcgggaggtaggagcaggtcgctgagagttcgatgccatcctagtctacagactgagttccacgacagccaaggttacacagagaaaccctttctcggaaaaaaagcaaaacaaaacaaaaaacaagcagccatatagtgtcagtctgtgaccaagtagaagggcaacacctgtctaggagatttcccgggagcgcagcactcagtggccgctcctggggccaataggaggaagtaagaggactggtgatctagcttaagacagcagttaactttgagggtgtgcaggaagctagcgggtataactctgtcacaaaagtggcagcagaaagaacttgtggtttctcaaaactaggatcccagcagtctgtggggcggggcaaagtgtgatcacgtgccagagccacgggcgtaaggctaggctggcgtctgcacgttccctggtnnnnnnnnnnnnnnnnnnnnnnnnnnnnnnnnnnnnnnnnnnnnnnnnnnnnnnnnnnnnnnnnnnnnnnnnnnnnnnnnnnnnnnnnnnnnnnnnnnnnnnnnnnnnnnnnnnnnnnnnnnnnnnnnnnnnnnnnnnnnnnnnnnnnnnnnnnnnnnnnnnnnnnnnnnnnnnnnnnnnnnnnnnnnnnnnnnnnnnnnnnnnnnnnnnnnnnnnnnnnnnnnnnnnnnnnnnnnnnnnnnnnnnnnnnnnnnnnnnnnnnnnnnnnnnnnnnnnnnnnnnnnnnnnnnnnnnnnnnnnnnnnnnnnnnnnnnnnnnnnnnnnnnnnnnnnnnnnnnnnnnnnnnnnnnnnnnnnnnnnnnnnnnnnnnnnnnnnnnnnnnnnnnnnnnnnnnnnnnnnnnnnnnnnnnnnnnnnnnnnnnnnnnnnnnnnnnnnnnnnnnnnnnnnnnnnnnnnnnnnnnnnnnnnnnnnnnnnnnnnnnnnnnnnnnnnnnnnnnnnnnnnnnnnnnnnnnnnnnnnnnnnnnnnnnnnnnnnnnnnnnnnnnnnnnnnnnnnnnnnttgtaaaatgggctcagtgttgggccatgtcagaaattgagaccactagcttgtgaaaacttcagcaggagggagccacagtcagtgattcttggtggcattgatgttgagcgaaactcgctggcacccctcctgagcacaaagcttcctagttcatgtttccagccttccagtgcatacagggaagagctcgcttcctgtggaaaggcacaggggtataccactgaagctcattcaagagcctttagcatctcagagtactagcgcttccctcagggctgcttcagtaagtggtcactggattcagggacgcggtaccgaggagacctcggcttgatcctttgggcaagactgctgagaagaacagggacttagctctccaggtgagagagcaggtcctatctaggggagtgagaagccaaacccaagaaacagccttcagatggaggtatcatcaaccctcagtcatgcttgtattgacacctagtcctctagttctgaccccattgtctcagtggcaactggaagtatacctctactgaccactcatttggaggtcctggtcagagagggacctacatggcacctattaagatggggctggactgaagaacagtgacctggatagctgctgacagtatcctgggccaaaaagaaggaaaattctcatgggtgtggaggtggggactggactggaccttttgatccctctttttttttccttttatcctttcctgaaatcccatggtttgggttttaggaacttcagcttaaaggctggataggaaaaaggccaaaggtgagtatggtggtggctataggctactgagggagtgctgatccccagcaggagacctgaaggggccagaacagtttagttatgtgaaggaaagaatctcctttggctcctatgtagccctcctagcttcgtggaccattccattcagaaaaggaagggtgtgtgtgtcttttgtaagattgtatcacagtgtgtccaggcacagatctaggactaggatctaggacccacagccactctttcatttccatagtggaatggtagatggatacctcactgatgtgtccctcccctgcaggagaatataatgaaatccaacattgacaagaaattttctgcacactatgatgctgtggaagcagagctcaagtccagtactgtgggtaagcaggaccatcttcttccagacccaggggctactccttcactggccctgggtgaccagccttttcttccatgtctccttgcctcccaggtcttgtgaccctgaatgacatgaaggccaagcaggaggcactggtgaaggagagagagaagcagctggcaaaaaaggagcagtcaaaggagctacagctgtgggtcccccatcctctcttagcagtcctcccattatagtacagcgagtgcttgggaactcctgggggtgggtcagtctgttcccattcccattccatagggagaccccattttctgctttgggagcagttgtggtatctattgagctccacactggttctcactttccaggtttatctttctttctgttcctctgtaaaggtggtgagtcctttctgagccctttctttttactgggtgcctgaacagcctgcattgtccccattcctctctgtcccatgacccctgtgtcctttatggttggtgtgtcataattagagccctgccttttagcttgaagtaaactagggcaaaaagaatccctctggggtgctgggaagatctaccctgtgctaagtgaaccccatgctaggtacacagtggttctgggtcagagaaggggtctcaggacaggaacatggggcatgatggccacccatgccttggtaggaagctagagaagctgcgagagaaggagcgcaagaaggaggccaaacggaagatctctagcctgtccttcaccttggaggaagaagaggagggaggtgaagaggaggaagaggtggccatgtatgaggaggaactggagagggaaggtgagggcactgcccgccagagctctgtcctggcatttgggctgacatttgggctggcaaaggaagacacacattcatgttttagcctgagtcacctactgggcttgtggtccccagtttcacccagggtaggagaagaagacagaaatgaggcagcaatcaccatatttttaaagctaaagtaatagaattgctgtcagcgtagacttgagtcagagctaggccagtagcccctgtacaggacccaccagtgtgagaagttaccagagtactactagttcctggtatataaggatccagaagctgtcctttggcccacccaggataaactgaggcagggagaagatagtctggattaggcttgcctattgaaactttctgaaataatgggaatgttcatgaatacactgtcagatattgtggaggttttttgtttgttttgttttcgatttttttgagttgggtttgtctgtgtaatagtcctggctgtctggaactcactttgtagacaaggctggccttgaattcacagagatacacttgcctctgcttccctgagtgctgggattaaagcataggacagtatgcctggctactgtcaggtattgtaactgctcactacaggtggccactgggcactgatgtgattggtgaatttgatctatacctgctgaagtccaatgcttccaatgtatagtcctatgtatgtatatctgttctgtgcatggccaggctacacagtcagtatgggctcagtatgctcaggattccccaagagcccgggggaaattggctagatcaatgtgagcgagtcacatgatgagctctttagttgcagagatgggaggagacaggaagagtagatgataaagtgaaacagttatactgtaataacaggacaaaggatgcatttgagaacttggaataagttaggtaatagctgttatcttagccatgtaggcccctctcctctggttgcttcctgccactgtaattttttaaaaatttcttttattaagacaggttttcatgtagctaaggctggccttgaactccagatactcccaattttcctcaatgctaagattgtaagtgtgcactaccacactgggcccttccattttaattttagcagtatatttaacccagtagaggtcagtgtggcgagtagtgttattttttgttttacttgatttattttgagacagggtactataaagctcagtctggccttgatagtgatcttgcctccaccttaggagttctggattgcacaggctagtggagtggttgtcaacctcattgtgtatcagtgacattttttctttcagatagtctcactatatatcctaggctggcctccaaatttcaatgctcttgccttagccttctgagtgctaggattgcaggtgtgtgccactacacctagttcactggggcttttgaaaagcatggcttggtgggttttccccttccatccagagatttcatcttggggtcttaacaacaggacccgagcacccagcaccctggcatctattattttttttcttttagtttatgcttgttatttatcaaggttagtactgtttttgtttttttctttattttatttgtttatttacttttggtttttcaagacagggtttctctgtgtaactttggagccagttctggcacttactctgtagaccagactgatcttgaactcacagagatccaccttcctttgcctcccgagtgctgggattaaaggtgtgagccactactgtctggtggtttgtttggtattttttttttttttgagacagggtttctctgtggctttggagactgtcctggtactctgtagaccagactggccttgaactcacagagagccccctgcctctgcctcccaagtgctgggattaaaggtgtgggctgccacaaccgcacgtgttggcatgtctggcactcactgtgtaccaagctgggcttatactctgatcctggcatgcttctcctcttcagagtactgggattaaaggtatgtgccaccatggctggctaagtcagtagttcttaaaagatgctccaggggcctgagagaccttacagaggtccacagagatcaaaatcctttttagggcaggcatggtgcacacctttagtcccagcacttgggaggcagaggcaggcagatctctgagtttgagttcagtctggtctacagagtaagttccaggccactcaggactacataaatgtgactttgtttaaaaacaaacccacagaaccattttctgaaaaatgataagatgttttttgtcctatttgctttagagatcaccacaaagaaaagaaaattggggaagaatcctgatgtggacacaagcttcttgcctgacagggaccgagaggtataaactgcctagctctggtgttgactttgatggtgttcatgaagttggttttggagactctaacccagggagcaaccctgaacctcatcctttgtccatttcctcttaggaggaggagaatcggcttcgagaagagctacgtcaggagtgggaagccaagcaggagaaaatcaagagtgagtactatatagctagatacagtggttttacctgttatcccagcactcaagagactaaggcaagaggatctgaagttcaaggtcattttatttacatggttagtttgaaaccagccttggctacatgaaacccagtgacaaaagaaaacagacacaaaaacaaacaataagatgctagtagagttgggcatatgtggtctagagttggggcagtgagaggagaacagagctaaggcccaaacagttctcttgcaaatattcaccttggctatgtatctcaagggaactcttgagcacttgagtctggagaccaagaggcaactgttctttgtaggcgaagagattgaaatcacctttagttactgggatggctctggacaccggcgcacagttaaggtaggcagtggaaagactcttttgtcttgagttcagtggaaaatagctgacagtcttggcttgggaaacctctgtggctagtagagtgggtctttggctttttagagatatttttttgggctgttgtctttccatcccaactcactggtataactgcttctgcagatgaaaaagggcaacacgatgcagcagttcctgcagaaagcactcgagatcttgcgcaaagacttcagtgagctcaggtgaacacactgcactgtgtgtgtctgtgttgtacatctgtgaagagcctgcctttctggccagggtatcaaacaaccttctgactgctccacagctgtgaatatgttatgctgatcattgtgctccttacagaggagagctgtgaggctggagagatggctcagaggttgagaccactggcagctcttccaaaggtcctgagttcaattcccagcacatatgtagtggctcatatctgtctgtaactccagttccaggggacctgacatcctcacacagacatacattcagataaaacaccaatgtacataaaataaaaaacattttagctggtcagtaacagtgcatacttttaatcccagcacttgggaggcagaggcagccggatctctgtgaatttgagaccaacctggtctaaagagtgtgttccaggacagccagggctacacagagaaaccctgtctcaaaaaccaaaaaaaaaagaggagagctatgctcttttttcttaacttccttctgtagagagcttaggtgagagaactctgccttggtgatatggtctagaagtagaggacactgggactcccatcctaggttcactaaactacacagcttcccttaaagtaaggcttaaaacattgtgccaactctgctgacttccagttgctcatcccctcctatctctctcaggtcagcaggggtggagcagctcatgtatatcaaggaggacttaatcattccccatgtaagtcacttcaaccctgggtcatgcacactaatttcataggagagtcaccatactgctgtacattcttccagggatggtaggcatggtggtgcctgctcccaccctgcaggatgggctgcagggagtagtgggtgatagaggcctagatggatcatcaagctttcctttccccaccctctgctcctagcatcatagcttctacgatttcatcgtcaccaaggctcgaggaaagagtggtaagtgattgtaacttggcttaccctctagcttgctctaatatgttgggaagggcagtagtatcgccttgggattactgcctctcccctccagggccactcttcaacttcgatgttcatgatgatgtacgactgcttagtgatgccactgtggagaaggatgaggtatgatagttccagggtactgggcaggcaaaggtgccctgagcctgacatgggggttgcccttggggagaattcacaggaagacaaggtcaggtagtatggccctgaatcacagccttcattcctcagtcacatgcaggcaaagtggtgttgaggagctggtatgagaagaacaagcacatctttcctgccagtcgttgggagccctatgacccagagaagaaatgggacaagtacacggtaaggaggcagggaaggcaggcaggaagattaggtcctgagaagccacttcttggtggtcccactgctggactgggcagctcaaagtcagagggtgggagtcatctcagctttcagtgacctgcaaccttcctgcctggaaaccaaagataactaatctgatatggtggcacatacctttaatccctccactagggagattgaggcaagaggagcacaagttcctagctatcccaagctacataacaagatcactaaaacatgaacatgcacacacacacacacacacacaccacacacacacacacacacacnnnnnnnnnnagaaaaggagaggaagagagagagagagagagagagagagagagagaagagaatcagatatgacatgatagcatgatagcctgcccctatttatttcctggcttccattccttgtttcacgtgtccccattttctcacaccagatccggtgaacatccagaagttggcatgaccttggctctcctcagcgctcccccagggctccaggtgccctgatattgtcattactgattttgtcttttacaataaaaaagtacacattgagcagagtgcattataaagctgtgtattataagaacctgtgctttatttttagagaatgtgtgtgtgtgcttgtgtgcacatgccagaaggcaactatgggtatcattctgttgtccaacatttttttttgagacaggatctcccactggcctggaacttgctaagtacactagactggcaggtcagagagccccagggagcttgagggttgaaattggacatgtataccatcaatgttgggcttttaaaaatatggattctagctgggcattagtggttcacacctttaatcccaacactcaggaggcagaggcaggcggatctctgtgagttcgagatcaacctggtctacaagagctagttccaggacagcctgcaaagccacagagaaatcctgcctcaaaaaaccccaaaaagtatggattctaggttttaaactcataatctcatgtttgcaaggaaaacactttaccaactgagctatctcccagccctaaaacatttttgttgaactaacatttatataatagtttggtaattttatcaggtgtgttgagcatacctgtaattctagcactagtgaagtagaagtagagagatcatgagttttgagattagtctgggttgcatagcaagttccaggccagcttgagctacagagtaagaccctgtgtgtcaatctcttacacaaaccacaccaaaggattcttctcttcacctatgcattttacttattttttagacaggatctctctacatagccatagctgtcctaagaactcagtgtgtagcccagggtggcttcgaactcagaaatccatctgcctctgcttcctgagtgttgggattaaaggtgtgtgcacatcacctgttcatttttaaactatataattgagtgaatagattagtttattcacaatgcaggcaaccatcccctccatattctttgagaacatttgcattattccaaggacttctgggtttttagcagtcattccccatattgccaggtctagaccctagcagcttttagtctttctgtagattggcctcttctgcacatttcacttatctggaaactgatagggcaacaaatctgaacagaaaaggagggctttctaagggaaggcccagccttcccttccccaggacacttaatgttgttgaatggataactgttgttgaaaggatactgttgttcttgaatgtggggacatgtcctcaggcttggacagggctctacaatgaaagggaatacctcctttagcctccttcccaggtccttgtgtcctcttagctgcctcttccatggggtcttgccaagcaaccactcccagctcctctctctagtcccagcactcagggctactatgggtgccttggagtcactgttcacttgccacatctgtgtctaccgtgctcagtcttcatggggactggtcactgttatagctctaggggcaggatctagctgggggtgggcagtgcttcagcctccagtaccactggctatgccatttcaatggccagctctctccattcctcttgggtaagctaagacatagtggtccagcttggagagtagagaaagtaagctgggattcctttccttgtttgaggccagatgcttgtctgtactatggagagcatcttgcctctttggcaaacatgaatatttgatggtactatgtagtgagctttgctgtggctggaggaggcctggctgctagctaggagctcttaagtccttgactgcctatggtagagacatctgaaatcactctgaggagggaagagggtagagtaggtcagggtatcttgggagcacattgtagtagatagttagacctcatcatctactccagatgtatgctgctgggagtcctaggtgcaaattgtcttagttctccatgacaaccccaatctgtcttttgagaaaccatcagaaaagaaggcactgtggagaaaaagttctctctcggctatctcatccacatattagtgcctcaaatacactttttagcctccaagctccttgaactctacattcatatggatctgaggcccatgggactcagtcatacctagataggaactacctccagtcctgcagcttctagaaaaggaactccttgaaattcagtcctgagtcttgatgggaaaggatctattttttggaaacaacaccaagtgtctggggagtccttagggtcaagactaagaagacaaaggtctgtcagggaaggagaggtcagttttttgtttgttttatttatttgagacgagtctttttgtgtagccctgtctatcctgggactccttatgtagaccagactggccacaaactcatagagagccatcggtctctgcctcctgagttctgggtttaaagacatatcaacatgcctggcattcttgtggccaatagaggggcagaagactgccatggtggaacacaggatccctttgtctgacatgttgagctgtattatgttccttgttgcaataaaatacctgacagaagctacttaaggaagaagggtgagtggggctggacaggtggctcagcagttaagagtactggctgctcttccataggacctgggttcagttctcagcacccacatggcacctcagaattttctgtaggtctagttccagggtatctgacaccctcacacagacaaacatgtaggcaaaacaccaatgcacataaaatttaaaaaacaaagggtttattttgtgtcatagtttgacagtacaatccatcatggcagagaaagtatggtagcaggagcttgaggcaactggttacgttgcatccacattcaggaagcagggagaggtgaaagctagtgctcagctcagttccttttattcattctgggactctggcccataggatggtgctaactatacccacagagagagtctttatgcctcatttaattcaatatagaaactctcatacagacagaagggatcatgagccacagtgtaggtgctgggaactgaacccaggacctcttcaagagcagcaagttctcttattttctgagccatttctccagattctatttgttttaaaatgaggttttgtgtaacccaggctggccctgaagtcatattctgagcatggtcttcaactcctaatccttctgcctctacctcccttgtgtgaggactatagacatgtacccaccatgtatagctttggtgatctttttgttatgtttctgtatctgtgtttgggtgtgaacattgtcataatgtgtatgtaggccagagtacaacttgcaagagtcagttctttctttctgtaatgtgggttctaagaatccaactcaggtcctccgacttggcagcaagtgcctttatctgttgagctactgagctatcttgccagcctctctaaattttttatttgttttatatgtatgagagttttgtttgcatgtagataaatatccatggaggccagaagaaggtagtggatcccttggaactggagttacagttggttttgagtcaccatgtgggtacttggaaccaaacctaggtactctgtaagaacaagtgtttaaatcactgaaccacctctctagccctccaccttttttttcaagacagggtgtcactatatagctctggctgtcctagaactcactctgtagatcaggctgacctcaaactcagagattcacctgcctctgcctcccaagtcctgggattaaaggtgtgcaccaccactgcctagctctagccctcctcctaaaaaaatctgaaatataggtaccttttatgtatgaaagataatagcatttgtgccatctaatataagcatataaacattttcctgatttttcatgtatttttttttttggttttttgagacagggtttctctgtggctttggaggctgtcctggaactagcttttgtagaccaggctggtctcgaactcacagagatctgcttgcctctgcctcccgagtgctgggattaaaggcgtgagccaccaacgcccggcttgttaagaagattcttattttttcatcattttaaaatttattttacatatcaaccacagtttctcctcccccctctcctcctattccttcccccactccctgcttcccccatccactcttcctccatctccattcagttggggtaaagtctcccttgaaatcaacaaagcatggcatatcaaattgaggcaggaccaagctcctccccctccatcaaggctgaacaaggcatcccaccatagggaataggttccaaaaacccaattcatgcatcagggacaggtcctggtccctctgctagtggccccacaaaagaccaagctatacaactgtcacccaaatgcagagagcctagattggtcccatgtcctctccctaactgtctgtccagagtccgtgagctcccacaagctcagatcagttgtctctctgggtttttctgtcatgatcttgatccccttcccttgctcatacaatccctccttcctctcttcaactggactctcagagctcgtcccagtgcttggctgtggatctctgcatctgctttcatcagttactggatgtacgttctatgatgacaattacggtagtcactaatctgattacatctgtgcatatgaatgtaggtacttattgaggaggtgcctattgaggacagaggcatcccatgccatggatctggagttataggcatttgtgagctaccagacatgggttctggaaactgaacttggttgggtcctccacaagggcagtatgctctattaactgctgaaccacgtccttaacacccagtataaaattcatttttagggctggagatttggctcagtggttaagagcactggctgctcatccagaggacctgggtttgattctgagcaccatatggtggctaattactgtctgtaactccagttccagggtatctagtgccctcctctggcctctgagagcactgcatgcacatggtgcattgatatacatgcagataaagacccattaatataaaataaatttgtaaaactttaaaaaataaaattcattctttctggatggtgaggcatgcctttgattccagcaggtgagaggctgaggcaggagaatgaagagtttacgaccaggaccggagagttgtttcaccagttaagagcagcatttgttgcttttgcagaggaccagggttccacccccagcacccacatgacagctcacaactgtatgcaattctagtcccacaagatgtaatgccctcttctgaccttcaagagtactagacttgtatttggtatgcatttataaatgcagaaaaaccaaatcatgtacataaaataataaaataagctgtatggtggtggtgcacacctttaatctcagcacttgggaggtagagaccagcctggtctacagagtaagtgccaggacagccagggctacacagagaaaccctgtctcaaaaacccaaaccaaaacaaacacaaaagagaagccagtgtgatatcaaaagcctctaatcccagaacttggaaggtagggtcaggaagatcactaagagtttaaagacaacctagtttactgctctacatgtgagttatcaagctatatagaaagaatgtctcaaaaatccaaaaagaaggctgggggatggtttggtaggcaagaacctttgctctacaagaacatttgcttgaggaaatgagcttgaattcgaagcacctacttaaatagtcaatcagagctatacatgtgtctacaaccacagctttgggggagtggagacaggtaacaataagccaaagagcaataaaagacatcaagtgttctgctctggcctccatgcatgtgcacaagggtacagatgtttgccatatttatgtacttgtatacatgtgaataaaaaagaagtggtgcacacctgtaagcccaacttttggaaggtggtgaaggcaggaggattaggaattaaagatcagcttaagctatatgagaatctatctacaaataaacaatatgtagaagtgttcctagtgggctggagagatgactcagtggttaagagcactgactgctcttccagaggtcctgagttcaattcccagcaaccacatggtggcttacaactgccttgaatgagatctgcatgcaggcagaagactgggtacataataaataaataaaatctttttaaaaaaactgttcctagtaacattatgcaaatagcccaagagggaagcaattcaaaattttgtcagttaatgagagaataaataaattttggcttatctatgcaacaggatattagctggcccaaaaagaaagtcttgatccatggtataactatgataaaacttgaaaatatttttttttgtttttcgagacagggtttccctgtggctttggaggctgnnnnnnnnnnnnnnnnnnnnnnnnnnnnnnnnnnnnnnnnnnnnnnnnnnnnnnnnnnnnnnnnnnnnnnnnnnnnnnnnnnnnnnnnnnnnnncggctaaaacttgaaaatattaagtgaaagaatgaacataaaaacacatttatattgcatgactgtatttgagatgtcctgaagaggcaactccacagtcagtaagtacatgactgcttcccagagcttgggtatgtatgtgaggttaatagagaatgataggtaactgctacagagttggttttagaagtgatgaaaatggcacttgggaggcagaggcagggggatctctgtgagtttgaggccagcctggtctccagattgagtgccaggataggctccaaagttacacaaagaaacccggtcccggaaaaacaaaaaacaaaaaacaaaaaacaaacaaaaaaaaaaaagaaaaagaaaaaccaaaaagaaagaaaaaacaaacagaaaaagaggtgatgacaatgtttcagaattagatagcagtgatggctgcacatctttacgattatattaagatggcactgaactgtatacattaaatacatgacatgaaagatgaattatatcttagtaaagcacctgtaattccagaagatgggaaggtgaagctggaggatcattggaagttcaaggccagcctgggctacaagtgtgaggcacggtttcaaagcaacgtggagaaaaaagccagctgtggttgtgcaagaccaaaataacacattacttggagggtgaggtacaaggttggtctgttctaggccatactgcactaaagggaaaaataaatgaaagaatgaaaaaggagctgggtgttggtggtgcatgcctttaatcctagcacttgagaggcagaggcaggtggatctcagtgagttcaaggccagcctggtctacaagaggacagcctccaaaacaatacagaaagaccctgtcttgaaaaaccaaaagaagaagaagaagaagaagaagaagaagaagaagaagaagaagaaggaagagagaagaaagaaggaagaaggaagagagaagaaagaaggaagatggaagagagaaggaagaagggagaaggaagaaggaagagagaagaaagaaggaagatggaagagagaaggaagaagggagaaggaagaaggaagagagaagaaagaaggaagaaggaagagagaaggaagaagaaggaagagagaaggaagaaaaaggaagagagaagaaagaaggaagaagaagaaagaaggaagaagaaggaagaagaagaaaagaaaagaaaagaaaaggggggaaaagagaattagaatcccacattcagggtcagagtgggttgttgaagaaggagaggtgaaaatggtagtactccaagctttgtgctgggtattatttgtacattattaggaccattggggaaagagttagagcgcaatctttgctagtgtgtttttgataggccgacccaagcaaaatcttgcaaccacagcaggtggcccagggctcccagaggaggagcccactcgcgctctaggcccaagggggtgtggcgccgccgcgcacggattccagggttgctggaggcagcaagcgaggaaatgggggtgtagacaggcgcgcgcctaggactcagccattgagcgaagggggtcatatctcaagaagggatccccagtggcccatgggcggcttnnnnnnnnnnnnnnnnnnnnnnnnnnnnnnnnnnnnnnnnnnnnnnnnnnnnnnnnnnnnnnnnnnnnnnnnnnnnnnnnnnnnnnnnnnnnnnnnnnnnnnnnnnnnnnnnnnnnnnnnnnnnnnnnnnnnnnnnnnnnnnnnnnnnnnnnnnnnnnnnnnacgtggccagcgctggccaccctgagtcagccgcgttggagggacaggtaggtggccccatccttacaaaccttgtgccagtagtctgatggatgtcctgtattcagacagcctggggttccagatggtttcaggggtcaggccttttcccggccttttgaggctcatcagacactacgtgccctgagcaagaagaaagagccaactcgattgtagccccattgcctgatactacccttttgtagaggagcagcagcatcagtgagcattgctgtagcctctgcattgactaaggtctccgcaggtctgcccaggggtgcccccaatgggggcagggccggctggattggtagtaagtgggaagcattgtgggagagcgggctgtggacccagatatttgtatggagctttccttatcaccgtgctcttttgctggcagggctgcagcagaggtactgggtgcctctgtgatgcctgaggttgccacttagaggtgggggctggggtggggtcttgggctgcaaatcacgactttccaggtctccttcccaatgtgtccctggctgctttctaaaattggctttctgcagagtgtagaaaaggtgagggtatgatgcatccgcttttctcttttgccttccattcttctggctgttgtgtgaggggtctgggatgcagacctgacaaaagaactccagagagctgatcaatctgagtagaaacttggcagtttcgagctggaattgctccctgttccaggaaatgctggttttcttttttcttttctatgcctccttgatttgattcccccccccccaatgctgagtccctcctgtgtctgtgtcccttgggaaatgggcagtgagagggtagcacagagctctgttccattgactgcagagactgctctgctgtctttgcagccagaggctggcagggtgtggcctggggatgaagtgccagcactgtccctatctgtatgggctgtgctccatatccctaagcttcaactgtatttggggatgctgctcaactgtatttggggacactgcttcctacatataagactttggggactctcaaaagtgggttagacccctctgctcctacccctctctgactaacctctggatcttcagggagagccacacagacctggcagagcatctgtctgcctgtatctgagcaaagcttgacttatgtctgtcttggtgagagtcttggctttgtgttgcagcagaagggccagacagcagactcctggataggcaggcagccaaggccctcagggagaggaaagcacctgaggccatgagctagagaagtggtggtactgaaactagcctcaggccttaattctccagagctttgctctaggactcctgttggcagtgccactcacagagaagcacctccacccccagcttgtgattgttctcttagtgcctttctccttccctagctcaggcaaggggtatttggggtcctgttgatgctctcctgtgccatcaactgctctcagccttaggatgtaatgtttgggtcccacttctggtacatcctcccaccctatcttttcaagcatctgcctctgctgcccccttgggtgtggcccagttgagacaaggcctcttggcttctttccagtacaggggtgggggatgattgatggcttccaagcttgcctgtgcttgttactcattcatttgctgtattagaggcccctcccctctaccagcctcagtcaccatctggggctctgtcatgttggttgagttgccctgcccctctgtggcatggagcctgaccttccagggtccctgggccaggcaggtcagggggagggagaataacttgggtctggggcctctgactcccacttgctgtctctcctcaggcccgtccctgatacatctgccagtcatgcccactgtctgccttctcctattgctattcttcaccataggagggtgcctgggtagcagcaggccctttcgtacctttgtggtgacagataccacactgactcacctggctgtgcaccgagtgactggggaggtgtttgtaggtgcagtgaaccgagttttcaagctggcttccaacctgactgagctacgggcccatgtcacagggccagttgaggacaatgctcgttgctacccaccccctagcatgcgtgtgtgctcccatcgcctggtgcctgtggacaatgtgaacaagctactcctcatagactatgcagcccgtcgtctgatagcttgtggcagcatctggcagggcatctgccaattcctgcgtctggatgatctcttcaagttgggtgagccccaccatcgcaaggaacactacctgtcaggagctcaggagcctgactccatggctggtgtcattgttgaacagggccaggggcctagcaagctgtttgtgggcaccgctgttgatggcaaatctgaatactttcccaccttgagttcccgtaagctcatcgacgatgaagacagtgcagatatgttcagtctggtgggtgagccatgcctctttgttgtgttctctttcccctgcttcttatgagtccagtccttattcactcctttccttcagtgctggtcctgcttcttgggaaggaaggctttggtttgagaggggaatttgtgatcctttactatcacagagatgtagaccagctgctgaggacagaaaagtgggcacaattcacctgtggaaagcctgtagagaggctgaggttaccttgcactctgtggcatgaattccagtaattttccaggcagggcaggttggagatcacagaggaagcctttggaggaccacattgttagaccagggttggaaaatcaaggtggagtggggaggaggcctttatcccgtactcatactttgttctactctccaggtgtaccaggatgagtttgtctcttctcagatcaagatcccttcagacacactttccttgtaccctgcctttgacatctactacatatatggctttgtcagtgcttcctttgtgtacttcttaacactgcagctggacacccagcagacactgctggatacagcaggcgagaaattcttcacatccaagattgttcgcatgtgttcaggagactcagagttctactcttatgtagagtttcccattggctgctcttggcatggtgtggagtaccgattggtgcagagtgcccacctggccaagcctggcctgctactggcccaggctctgggtgtgccagccgatgaggatgtcctcttcaccatcttctctcagggccagaagaaccgagccagcccacctcggcagaccatcctttgccttttcaccctcagcaacatcaatgcccacatccggcgccgaatccaatcctgctaccgtggggagggcacactggccctgccctggctgctgaataaagagctgccatgcatcaacaccgtgagccctttgcttgccctgctgtccctgtgctagacatgacagctctgtgcctttcttgcctttctgcctcctactgggtggctatctgtccagtcccaggcttggcatggtcctgggagtaacacctttgttctgataccggctttacgtttcttgagagccttactctcttcttatgtcttgaccagtgtcctatttgtatattgccaccttcattttcctgacactatattaattcccagctttcttcttgctctattcccaggcttctcttcccttttcctggtttctatccccagtcccatttcccatggggtcctaaggcaaatcgtcaggcatgtttggagggcagtagcttctagtttctgctcctttatagaatgagatctaatagcatctgtctatcttgaactctcactcacccctcctgtgtcaccagcccatgcagatcaatggaaacttctgtgggttagtgttgaatcaaccattgggtggcctacacgtgattgaggggctacctctgctggccgacagcactgatggcatggccagtgtacatgcacatacctaccaccagcactctgtggtgttcatcggtacacgcagtggtaatctgaagaaggttggtgctagaacccttgtgttatgggattgggaatgttttttacactatgggaagaagggcacacgagcctggataaccctgaacaggttatgatgacttcccaggttaggccccaagagctgagtcctgctgcttgggtggctccaccagcatttttttttttagctgaacccaagggagcctttgccttatccttagcctaaggctgtggttcttggagctataggccttcaaactgagtgcaggctcaaggaggtcctgcctgacttcaattcagcagcaatctagaaagtccttggctggagaggatgctctgggtacagggaactatggtagcataaagctggcctgtcatttctctgtcctggtcttgtggctcaggtgcgggttgatggctcccaggatgcccagctctatgagacagtccctgtggtggagggcagtcccatactccgagacctgctgttcagccctgaccaccagcacatctacctcctgagtgagaagcaggtgggcccgtggtgggtggtggtggatggtggggcaggggtgggctgtgtgctgatgtggctgtccccaggtgagccaactcccggtggagacctgtgagcagtatctgagctgtgctgcatgcctgggctcaggggacccacactgtggttggtgtgtgctacagcacaggtgagggcagagggtgagggacatgggggcagcaatgggctccctggggccattatcttgagagacagaaggatttaggagggccttgccagttggacagcagccagcaacacttgctataccttccttcacccatctgcccagtttccccagccttgagctttgagccttgagccttcccctccctcccttgtcctccactttctccagctaatgagcggaactttcaccctgagtgacgtcccttggatctcaggggatgaggccaaggcacactgttgcctggcagtatgagctgggtatgctgtcctctgccctcctcagcctcttactgaacccccatctgaaccttcctgggatagtgctcagactgctctggcctgtccccatttcaggtgctgccgtgaaggggcctgtccaggtgcctctgccccacatggctttgcagaggagctgaacaaatgtgtacaggtgcgggtccggcccaataatgtatcggtgacatcccctgcggtgcaggtaagggatatggagggtacttgggtgcatgtatgcttcatgaggaagggctacaccctgctctgagccctctgcctcccccagctgactgtagccatgcgcaacgtgccagacctcagtgtgggtgtcagctgttcatttgaggaagtgactaaaagtgaggctgttctgctgccctctggagagctgcgttgcccttccccatcccttcaggagctccagacacttaccagagggcatggtcagtggactaggggtattttgggtgttgtggggtagcacaggatcccagggtagttgatgatgaccatgtggcttgctgtaggggccactcatactgtgcggctgcagctgctctctatggagactggtgtaaggtttgctggggttgactttgtcttctacaactgcagtgccctccagtcgtgagtacctggtccaaaatctgtccctagatgtggagatagaaaggtgctttgggatatataaaacttgcagtgtggttgtctctagggctttgggggtgagctgttgggtcttcctgctctgtccccacttctctccaatcctgatatgcaatttgtggcttatgcaggttctgcctgccctcttcatttgttccttagtgcattttgtgggagggtgataacagggtggtgtgacgttctttgttattttctgaagccacttccatctccaggtgcatgtcctgtgttggcagcccttactcctgccactaaagtaagtaccgtcatatgtgtaccagccacccacacgagtgctccttccaggagggcagggtccacagccctgaggtgaggtggtgcagtgcatggcaaaaggctggggctccttgggggctcgcctctcacttttttgtttgctctcctatttccttggacgtgaagaaaggtgggtagcacagcatgcctctgacagttgttctcctcccagggctgccctgagatcctgcctcgaggagacctcctgatccctgtgggtgtcatgcagcctttaaccctgcgggctaagaatctgccacagcctcagtcaggccagaagaattatgaatgtgtggtccgtgtacaggggcggcagcatcgggtacctgcagtgcgctttaacagcagcagtgtgcagtgccagaatgcctcggtgaggtccccggtgggccagccagggatatttttgttggtttgtttttggtttttggtcaatgcccaacttactgatctggaaacctctggttgtccctggaaggtccttcttagtctttttaccagagattcccaagttgggcaaggattttgcttatcttctttgtgcttatgtggttccatttttcttagtatttctatgaaggtgatgagtttggtgatactgaactggacttctctgtggtctgggatggagatttccccattgataagcctcccagcttccgaggtgagggacggtatgggtctaaggagcatgctcctggggcagagttgacactgctggggcaagtctggaggccctagagccccctgcttctctgccactgcctgctccatcagtagtcccctgtgcctgcagcccttctttacaagtgctgggctcagcggcctagctgtggcctctgcctgaaggctgatccccgattcaactgtggctggtgcatctcggagaacaggtgccagctgcgggctcactgcccagctcccaagagcaattggatgcacccaagccagaagggtgcccgatgcagccatccccgaatcacccaggttagtttcacctactagtcctaccttgcctgctggacatgtgtgagtctggcctgatctttttgccttttatcctgctccacagatccacccactcatgggacccaaggagggtggcacctgggtcaccattataggtgagaacctgggcctcacttcccgtgaggttggtcttcgagtagccggtgtacgttgtaactccatccccactgaatatgtcagtgctgaaaggtgagtgtggccatgtgagcatacgctgtccttgtgtaccacagctggtcctgaccttctgtgactcctaggatcgtatgtgagatggaggaatcgctggtgcccagcccacctcctggccctgctgagctctgtgtaggtgactgttcggctgacttccgcacacagtcccagcagctctacagctttgtggtacatggcctaccagttccttccccttcccaagccttctcccttccctaactggggggatgtggagtggcccttggatggggttggctactacctcctctcaagggcttcttcttctccagacaccaacatttgaccatgtgagtcctactcggggcccagcttctgggggcactcggcttaccatctctggaacttctctggatgctggcagcagggtcacagtgattgtaagagatggcgagtgccagtttgtgaggtgggcctgaggataagcagtctggagttgagcattatgtggagggctatggggatagggtagctgaaggtcacctgcttcaaacttactgcttacttatgtaggagagatgccgaggcaatcgtgtgtatctcacctgtctccaccctgggccccagtcaggcccctatcacccttgccattgaccatgccaacatctccagccctggagtcatctatacctacacccaggatcccactgtcacacaccttgagcccacctggagcatcatcaagtgagaccctgaggagaatggggttgagtactgagttggggtgctgagtttctctcttggggccttacctgttactggggccttggggcatcaaatccttcctgaacctgcatcagtaggggacacagacttgcccatatagagcctggtacttattaaatgatacaaggttagaggtgctgaggtctcagaaaaaccttggtaacttcagggcagggtggaggagggaacctgagacctttacccatctctgcagtggaagtactgccatcactgtgagtggaacccatctgctgacggtgcaggaaccccgtatacgggctaagtaccgtggtattgagaccactaatgtgagtagcagcttcccacccctctcccacccttgctacttactcaaggcttcatgtacccaggtgattgctgttgtcttcacagacatgccaggtgatcaatgacacctcaatgctatgtaaggcccctggcatcttccttgggcgtcctcagcctcggtcccaaggtgaacaccctgatgagtttggcttcttgctggatcatgtgcaaacagcccgctccttcaaccgctcttccttcacctactaccccgatcccagctttgaaccaattgggccatctggtgtactagatgtcaaacctggctcacatgttgtattgaaggtactggggacagggatagagggtagaaaggaggggaggagcagagagctggaaaacttgaccgtttctgtgtggattatccattgctagggcaagaacttgatccctgctgcagctggcagctcccgcccccacnnnnnnnnnnccgcctcaactatacagtgctgattggaggacagccgtgtgcactaactgtctcagatactcaacttctgtgtgattcccctacccagacaggccggcagtctgtcatggtacgtataggcttgggaggccaccagggcagccttgggtgtgcatgagagttggttcaccttgagcctacacttacaggtgctggtaggtggcctggagttttggttgggtaccctgcacatcactgctgatcaggcactgaccttaccggctatggtgggactggcagcagggggtggactcttgctgctggccatcactgctgtgctgatcgcctacaagcgaaagactcaagatgcagaccgaacactcaagcggctccagctccagatggacaacttggagtctcgtgtggccttggagtgcaaagaaggtgcctaaagccaggagtgtatcacagtatgtgagagctgtgtgacttccttgcctgttgctcaacttattcaccctaatttcccccagcttttgctgagctgcagacagatatcaatgaactgacaaaccacatggatggtgtgcagatccctttcttggactatcggacctatgctgtgcgcgtgcttttccctggcattgaggcccacccagtgctcaaggaactggatgtgagccccccccctgtagccagtccatgttctatttcccccagagctaccactacttacattctaagactctctggtccccacagactccccccaatgtggagaaggccctgcgcctatttgggcagctgctgcacagccgtgccttcctgctcaccttcatccacactttggaagcccagagcagcttttccatgcgtgaccgtggcactgtagcatcactcaccatggtggccctgcagagtcggcttgactatgccaccgggctgctcaagcaactgctagccgacctcatagaaaaaaaccttgagagcaagaaccacccaaagctgctattgcgcaggtatgtaactgtcttgtctggcctctcccccagtctactcttccatttcctatttccagcccctccatttgttcaatccccacccttagcaggccagggccttaggacctatctcttgccacaggacagaatcagtggctgagaagatgctcagcaaatgtttcacattcctgccacataagttcctgaaggtgtgctgggggactgggcagcaggggaggaatgttcaggggtggtgcagttaattgataagccagccaggcagccagctatgcccttgaccctgggtgcaggaatgtgccctccagccacttttcctgctgtactgtgccatcaagcaacagatggagaaaggtcccattgatgccataacaggagaggcccggtactccttaagtgaggacaagctcatccggcagcaaattgactataagactctggtgagcatggggcagtgtgagcaggagatggggtggaggagtcttgctcaggattgatgctggggttccttcactcttagactcttcattgtgtgtgcccggagagcgagggcaatgctcaggtccctgtgaaggttctcaactgtgacagcatcacccaagccaaagacaagctgttggatactgtgtacaagggtatcccatactctcagcgccccaaagctgaggacatggacttgggtaaggtctcttccttttctcccaacccacacctgccaatccttcccaggggactctcatactctatatctgggctctgttccttaagagaagtgggcctaaggtcttgtgaagtaaatgtccctaagagctactgtaacctgcagaatggcgccagggccgcatggcccgcatcatccttcaagatgaggatgtcactacaaagatagagtgtgactggaagagagtcaactcactggcccactaccaggtgaggaactgggagcctattcacccccaggtccacctacgagcagtagccaggtctgctcccagtcgttatccctatattcataagccctcctcatagggccttggttgccactatacatatatacattaagagtctagatgagtggtggccccttgacttcctgcactgcctctttgtctttggacctccaggtgacagatggttccttagtagcactggtgcccaaacaagtgtctgcttataacatggccaactctttcacctttacccgttcactcagtcgttatggtaggtatcctcatcatggtggcctctgttggccctgtgccctttaattaaggttgtataagtcatgttaggaagccccaagtagctgtcttgatccatctggaaacaccttcattattttgggcctctgggtagtctccagttctgtagcacctagtagggaggggtggcaagaatagatgggtttcacaaaggttcctgggctcttggaggagaatggagcaagagggtggataatggccagggcctaagggtcacatctgtcctctgccctagagagcttgctccgtgctgccagcagcccggatagcctccgttcccgagcacctatgctcacacctgaccaggaggcgggcaccaagctgtggcatctggtgaagaaccacgaccatgctgatcaccgagagggagaccgtggcagcaagatggtctcagaaatatatctgacaaggctgctggccaccaaggtgtgggcctgccccaggctcccttggtacctgcataaacaccttctagcccagtcttagccatgagttgagctggttttaccaggcaggggctactttctcagggcctttgcagtagtacctctaggcctgaggtcaagagcaggtccattttaggaatgctggccttcagggggagttctttactgagcttttttgcccctgtctgtcatatttggggaactttgtgacacagttgccttattgtcactcgtagggcacgttgcagaagtttgtggatgacctatttgaaactgtgttcagtactgcccaccggggctcagctttacccttggctatcaaatacatgtttgacttcctggatgaacaggctgaccagcgccagatcagtgaccctgatgttcgccatacctggaaaagcaactggtacttatgggttcctggctgctgttcgcccttttgaggatgggtaggaggaagaggctagacttagccaaactctaaggcccatagaggcaggttgaatgacagcagaatagcctttcaggcaggagagatgggacttggcctggaactgaatatgagtatatagaaggtgggtactgctgggttgtgcatatgggaagtgctagtctagcactgggattggccatttttctccagggcactaaacagggtagagatattgatggcttggcacaggtagagacagtggaaacttcagggatggaggttgaggacagaaagccatctgttcttatttctcattgcctgagtccagcagaatattaaataaaaagccatttaccctaaatgtgtccttcctgttacctcaggagaagacatgagctggctagacagtaacaaggtataaaggaaggcagtggagaaagggggacccatagggccacttgggagtctcaaatgtatgtccctctgtacagcttacctctgcgtttctgggtaaatgtgatcaagaacccgcagtttgtgtttgacatccacaagaatagcatcacggatgcctgtttgtcagtggtggcccagaccttcatggactcctgttctacatcagagcaccgtctgggcaaggactccccttccaacaagctgctctatgccaaggacatccctaattacaagagttgggtggagaggtgggccttgtgagactgctgtgtgggcatggtggcaggctggaactggctgcctaaacggcctgtctaaggctggccaaacactgatgacatgagttttggcttttctaatatgtgcaggattgactcacccagggtctctacaggtactaccgagatatctcaaagatggcatcaatcagtgaccaggacatggacgcctacctagtggaacagtcccgcctccatgccaatgacttcaatgtcctaagtgcactcagcgagctctacttctacgttaccaagtaccgtcaggaggtatgttgatgcaccttacatacccccagttacatagttctgatgatgcaattaggggcaaaggcatggaggttgatggattgaggaatgcctcaaggatttgagcaagttgggacacagaatctatcttgtatcttgtctacattccatcccttgcctaggaccagcacaggtaataatttccctagatgctgggatttaaggaatacaggagagaaaccattagctggagtatagagttcccactgaataagagttaaaagattggaaaatcagaagaggtgggccaaggggtatggggtgggtgttgtaatttttaaaaaagcgacattcgagagaaagatgccatgggacagagcttgggtagaggtttttttaattgggggaaagtaaaagggaaaagcaggggataggggagactgacctctggggacaggagtggcagaagagaaaagaaaggcagagagaggggggagagagaaggagagacagagaagcagagagagagagaggggaggagaaagaacacactaaaatagggagagaaagagaaggatgggaggtgggcagggccccctttgttcttttttttttggtttttcgagacagggtttctctgtgtagctttggaggctgtcctggaacttgctcttgtagagcagtctggtctcgaactcacagagatcctcctgcccctgcctcctgagtgctgggattaaaggcatgtgccaccaccgcccggccaggcaggacccctttaaaagggaacatagtgaatgtgcacaggtggtgctcttagtggctgcagttgagagcatatcctgtcagaacccaaggacaggccaatacagatgcctgaatactaacaatgggacctgaaagtaggtgcatctagctattaccagggcctgtggattttgtggttggagatgccagcagacagaggaacacataaggctgtggaggcctggattcatgttcttctgaataactggatgttggtcacaagctgaaatcaaggatcactgtgggacttcttcagcctaagcaactgacaggatgaagttcactgctataaaaacagtaatactataaaccacaggaaagactgtagatggaacagctttgtggggcccagggaacaaaaaccaagaatcttcagaaccactcaagtaatccatggaaagtgctaaagccctgagggaacatagagcatcttgggataggtatcagtgatggtgtaaaagttgattgcatcagactgggaagattgagtccaattatcattctcctgctaactagactcaaaattacaattatgccaggtataggagtatagattcaggggaagtctttggatgaagtacacttttggaaaccatagatggaacgtaaagccctgagccaggggttggggaaaatggctcagttgattgagtaccttctatgaaagcatgaggaccagaatttggattctaagcacccatgtaaaaatattggataaggtggcatgtttctataatcccagcactggagatggtactggaggagataggcagatccccacagctccttagtcagccagtctagccaatcagtgagttctatgttcaatgatagaccctatttcaaaaaataaggtagatgggctggagagatggctcagcagttaagagcactttctgttcttccagatgatccaagtttgattcccagcacccacatgacaactcacagccctctagctccagttccaggggatctggtctcttcccctggcttctgtggaagattttatttatttatttattatgcatacaacattctgcttccatgtatatctacacaccagaagagggcaccagatctcataacggatggttgtgagccaccatgtggttgctgggaattgaactcaggacctctggaagagcagtcggtgctcttaacctcacccatctctccagccccactcatacacatttttaaaaaggtagagaatgatagaaaaaagataccaggtattgacctctggactccacacacatgcatgtgtactcacatgcacatgtgtacacagacaaatgcagatgtgcatgcatgcacagatgtattaaagattaagcccagtcaggagttggtggctcacgcctttaatcccagcactcgggaggcagaggcaggcggatctctgtgagttcgaggccagcctggtctccagagcaagtgccaggacaggctccaaagctacacagagaaaccctgtctcgaaaaaccaaaaaaaaaaaagattaagccctggccactcatggaacttttagttccagcacttagcaggcagagacagccagttcactgtggttcaaggctaacctggtctacaaagtgacttccagaacactcaaagatacatagatactgtctcaagaaaaaaaaagaggttcaccaagagagatcaaggggccttagagagagatctggtactctgaacccctcacaagtcaaacaggaaaagttgaactagaagaggactgggagggaatccagaagtggctggcagagtcaaccctgtatcctgagccagatccctgcatggatcaaggaggatggagtggacagatttgccaagaagatgttggagtttcagttaggagggaacaggaattggtaacagcaagtatggcccactctccaaagaagccatgatagaagagaaagctctgtgcttggggatgatattaggagtcaagataagtaggtggttttgctgagagattagaggtttggagcttgagctgggcacacacactgaagcctgtgggagggaagagcccatctgggaagcaagggctttgtgcagaagtggagccctgccttggagcctgttccaattgatcttcatctcctagatccttacctcactggaccgagatgcctcttgtcggaagcacaagtttcggcagaagctggaacagatcatcagcctggtgtccagcagcagctgagtggggagatggtgaggagggggcttctcacttctgagccatcctcccatccagggagtggctggctgtagcctgagtctccagggctgagacccagatctggtgttgttggggaggttaccaggccaagatgcccccatcacacctgggccctcttcgttagtgccttgctttgggtcctgcagggggagggggtgacaggaccaagctccctcaccagcagcagcaatacccccaccctcttgcccttgtgtttccatgtcaagaaagtctttgccctcttagctctgtacaccctacacacctatttattaacctaaccaccttaactttcatatgtaaatatacatgccccatgggatattgctagcctcacagacctgcgtccttggttgatgtgggccctgcttcctttatgacattgccagccttggtttagtatctggcatctcacctttgccatgtcaggccccacttgtactaagagagcctcagtaccagcagcatttggggttggattatacatctgaagctgccctcagattggctgggcctggccagtgtccctcttcagatgtttcaggtgtcagaccacattttcatggggcctgttgtctctgagacaactataaccaggttgtgcttgggcctgatgtgggcctggacctctgggacattcctcgtgtccgtactgccaaacttcctcagtgttgtaggcatttgccctgaaccccctgagcctcagctgccccattatgtgcccatctctaggggacaaggtggcagtgccttactgttttgtgtctcctcctgcctcctctgaggaatatggccctgtctgatagtcccagaccccaccacactcttctttcgttgcatgagtttttctttgttgtaattttttcctaattaaatgttgggaaatggggtcagtgcatgtctttgtctttggcgcaagtgggtagaccattgggctgtggataagcttgactgtgggaggaaataataactctttgtaggatttcttatgatttgaggaagatcatagccatgggtagtccattaggcaatcttggtggccctagcttcaagactgaataagtctgcttccttctccttgcatccactgtctctactcagttgtgtccatctccctgcttctgccttgcccttttagcacattgttagttggagacaaagagatgctgttaagaaataagggacatgtccccactgtgttaaaaaaattcttcagtggggactggagagatggctgggtggttaagatcaccagttcctcttccacaggatctaggttcaattcctagcacccacatagtgacttacaattctttgtaactctagttctaggaggtctgatgccctcttctggcctcctcaggcaccaaccatgcatgctgtatttttgcaggcaaagcactcatacacaaaaaataaaatgaaactaatttaaaagaaaaactttcagtggcttcacttataccccaaattctgaagatgtggcaattaataggactataactgtggtggacctacctgtgtgtgaattactcccatcactttttagatgatgtatatgtggtgaagataattgtacaattttttaaaaaaggataacttgagtttgaggagatagctcagtggttaaaagctttgtcacacaaacttgaggattggagtctggacagtaattaacagcgctcagaaagcagaggcaagggtatcctgggacaagctggataaccatgctagtcacatagacaagctctgggttcaaccgaaaaaaaaaaaaaaaccctgccttattgaataaggtgctcgagagtgatagaaaaaagattctcaacatcaacctcaggcctccacacatatacaacaggttcatccatagacactgcatcatgcatataatacacatgtgaaaaataaaacagggtagcttactcctagtacttcagaggtgtcagcaggaattcatgggcagcttcagctacatactaaactccaggccagtgtgggccacatgaattatctcaaacaacaagaggaacaccacacctggcttgtgtgattctcttttttgtctagaagttaaagaatgccttgttttgcagctgtggctgcctcataagacctgtacaagatcaaggtaatcaacagtctagtgttgaggaggagaggttaatgaggtcccatctataactggggagcttttaacagtggatggtttcttggagaaggaaaaattagtttttttaaggatatggccctttacaggtcaaccatgtcccagtggatggccccacacccaggagtacatgggccgcacaaattggacttgatttattttgaaaaagaggacatgggccagttggtggtggctcatgcctttagtcccagcatttgggaggcagaggcaggtagctctctgagtttgaggtcagcctggtctccagagcgagttccaggactgccagggctacaccgaaaacccctgtcttgaaaaacaaaacaacagatgaggacacagatttggggagggggttaaggaagcagtagtggatctgggaggagttaagagaggagtggaggtgaacaactacaatacattatatgacattctcaattaatttaaaatactataagtgccttgtttgggaggcagaagagatggctcagttggtaagggcacatactgctgttttcccagacaactagagtttagttccctgcatccatagcagagaactttttttttttggtttttcaagacagggtttctctgtgtagctttggagcctatcctggcactcgctctggagaccaggctggcctcgaactcacagagatccacctacctctgccccccaagtgctgggattaaaggcatgcaccaccaacgcccaatagcagagaactcttagctgcagctccaggggatctgataccctcttctggcacccaggggcacttgcactcacatgcacaaactcaggacacacacataatttttttttaaaaaaaattaaatcttgtgtctgaaacatgatgtcttcagtaatagggacttacattcatttctccagctcctgtttccaaaataaagattaagaaaaagagatgaaagccgggcagtggtggtgcatgtctttaatcccagcactcaggaggcaggtggatctctgtgagttcgagaccagcctggtctacagagtgcgttccaggacagcctccaaagccacagagaaaccctgtctcgaaaaaccaaaagaaaagagattggagagaatgctttaataacagagcccatcagataaataaatgacaccaactttagcagatgagaccctgagtaggaacttggaacggcttttaatttcagggcagaacactgaagaaaaggcaagcagaaggacagaacccgagaggcacctaatggattccagttgaaagttccacaggacatgggagcacaagtgtgtgagggaggtgatgaggcctgagaaaagtatctgcccctgtgataaccgcacagcactgaaagcaagacagggactagtagttgcctctttttttgagaggcagaggaattattagaagagtcatgcctcaatagtgaggaaaacctatttctatacacagagttgctctgttccatgcagcacacactcaaagtaacatacagaaggctcacatgctttccaagggatacaaacaagaggaaaacttacctcagatagaagaaaataaatcattagtcattcagagtagaaaggaagaggcacaactgcctttattctgaggaacatgataacctatagtgaaatatctaatggtatctgtggtgatatcttgtttgtacaaatgaagcttgattgaagatcagagggtagagctagccagcagctaaccatagacgtctggaggtctgtgcagacagataggaagtgagatggctgggttgagagaggaatatagacaggaggaaacaggaactcggtctcttctgctgggaagctaaagagttaaaggtgactttggtttgctttctctctgatctctcagcatgtattattaaggcctattagaacttgtgttacatatttgtacaaacaagatatcaccacatatccccctttttgtctaaaaatagttataactaatataagaaaaactatatacaataagtacaataactatacaatatattcaggcaataagtgcatcaacaatgtctagtccatttgcatttgacaaattcagagaaaatacttcattatcctatcttggcgagtccaaagtcttgtacataatttactttctattctaatttgcgttatcaaattatctttaaatgtctcaatcttttacactttacatatctttagtgtatttcttttctgagtatggtaaacaaggaaaactataactacactaactagtcttcaattccctcagagacccgagaaggaaataatactaagcaggaagtgagagcaagtgacttccacaaaaatgtgagaaatgaaaaaaatatgtggctgcctgaacagtcacccaaggttcctctgcaacattggggcatccatcttcagccaataggtctagcatatctgacaaacatttctgtgaagtaggattttctgaagaactgtcccaccttgtcttggtaaggttttgcaatcactctattttgtgtcctgtatgtccaatttggacagcatacggtcatcagtcaaggcaagggaacttccttgccctttgatacaaagaaagcaaactccatgtggagtttctttgatgcccatcatcttctctgaagtagattggtgttcccaggagcagacatgtcttattgtcattaaaaattctgttattaaaacattttaaatgccatattctgtagatttctgaaatgtttcaagatgacctgtctatctaaaatatatctctgtttgaccttgaagacattgtctaatatgactacaagtttggttgtaatagctgactaattgctaatctacattatcttattatcctatatagttgataataataactttcaaagactagaaattttcattacattgttaaatgagctatataggtacaatatcttgaacaatattagaaatgtatgtacagtgtgttttaaccaattaatttcaaatttgtatcaatatacagtatttgtacacaatatacaaaagtccaatccaatataaaattagttgttgctttttagaagtagattcaataatctacctttctgtcttatatatgtatcctcccatttttttcaaaacaagagccctgaatctaatctcctttgttttgctttttgtcctaaccattaccagtaacaacttgtaaccaattcccttaaacaatgacagatatccataatctattgaatgaccaaaaaccagccaccccaccttttgggaatatgggcatcatgttcttaaatttacttcttgctgtctgggggcaacggcatctttaggggatactgaaaagaaaaattgggttaactgtcaagctgtatcatttgttgttcagtccctgtgtgatgggaaagtgcagggctagtctcaagtcctggctaaagtagtgtgtgatgctggatcacctcacctggccaccttgaaattgttctgagcagtgtctgtgaggctggatcatctcagcaggtaacctcaaaattgttctgagcagcttttagtccaaatccaatttttagttggagttgttcagcttaatggtgttatcatagttctggtgggattgtcattgtggggctccatcctcctttgggagatttcaaaggttgcagttaggcatggtcatggttcactgtagaaaactgctagagactcaaacctgaaatcatgtacaggaaggtacatgaagccttttttttttctaaaattggttagtactctatacaannnnnnnnnnnnnnnnnnnnnnnnnnnnnnnnnnnnnnnnnnnnnnnnnnnnnnnnnnnnnnnnnnnnnnnnnnnnnnnnnnnnnnnnnnnnnnnnnnnnnnnnnnnnnnnnntatgtgtttccacatggtcttatcttacccgagaagggtctggacctgctactcctttgtgctctacattgcgactctttttggtgggctccttttgcctagctttcccagaattctcctcatcttctgttcccacctattttcctgcctcattggccagtgttttattcatcaaccagtaagagaaacatatacagaaggacagcccccatcaaatagtcccttaatttttgtttttcttctgttccatatcaggtggctcttctgacatgagacagattttttattttactttaacaagcaaacttgggttttgagaaggagagagccacactccaactccaaagccagctttaatctttaattggactgggactacaaaaagatcatttacattatatgtctgtagaaaaaaacagaaacaaacatttgggaagatttataaaattttattctattggaaatgtgataaaccagtaggccaatttattatttttcttggggcaattttttctggatgatttgtccgtttttttttttcagatgtctcatttatccagtgatccccagattctttagccggatacctttattctcatgaaaagacaaaaataaagcccttccccaaccctaaatttttgaggaggttctcctttggcaagttatatctgatcaaatgaaaagcatttattaattttatagcttagtttagattaaatggccatgctgcttgatgaactatcgtctcttctaattaagaagtgccttgttcagatcaaatctttatcaattttgatggtatccatagattttcttcacctgtggaaacaaaagcaaaacttcttccccaatgtaacacatgtcccggtttcctttcagatgtcaacacatttttgaagtataccggctgatttaattccattattttttctgttagccaatgtctttctgcatctgttgttccttttctcataagcattcagaaaattcaaagttaataaagcactatgtgatctgtttctgggggggggtctttatcatccctttctgtttatttagcatatcctttagagttggatttggtcttttctgtaactgtttgcccggtaggatatacctgtaatatgctttatattataacgagaaaaaaactgtttaattttcttagagatatatactggagcattatctgtcttcatttttgtaggtatacccatgatggccataatttccagcaattaccaaatcagccttttccaaactcaaattcagttgcccattgaaaacctgaataggtatcaatgttttggtgtacatattttaattttccaaattctataaaatggaacacatccatctgccagatttttattcatttgaataccctttgggttacttcctgctgtagtggagtttggttgtataaagaacaagcagaacatttccttataattttcttgacttgttgccaagtgatggaaaagtcttttttcaaatctttgttattgacatggtgtttttaatgaaattctgaggcctttagcacatttcctatcaacagttgatcaatttgatcatcaccttgtgctaaagggcgtgactcccatgggattggatgtgtgacatatgatatatatggatgattcctgttcctgattaaataataatgtcagttctgtattgtctggtataaattcagcagtttcaatatgcaaaaacaactctttctgcatattgtgaatcagtaactatgttgagaggttctttatgatccattaacaccatgagaatagatataattcttacttttggacagaattataaggacttagatccactttacttaaattttctgatttataagctgcctttccttatttatttgcattagcacagaatgtaggagctccagttattggtgttttccgtacaatgcaaggaaggatccagtcagttctctttataagttgaattttcttgcttttgggatatttgttgttaatctcttccaaaaaattaacaacatcgattttcccaggttcactttctactcataatttatcaatttcatcattagtaaaatgtactataatttctgctgggttgattcttgctagttgatgaagtctcaattttccttttcgaatcaactactcagagatcttttccacctaagtttttaactttttgctcagtttatgtggtaaaaagatccattctatgataatatcttccctctacattaaaactcctataggggaatgcttagagggtaatatgactacaatgcagttaagcttcaggtctacacatccacatgtgcaatctgtaatttctcttccaccaaagccaattttctctcagcttcagctgttaagtccttgtcaacatctaaagttttgtttaaattaaccagttaatcagattttatcctaataatgtgccacagatgggaaatgtctctttgcaatctttgaaagccattaagagactgcaaatgatctttcctaatttgcaccttttggggttaatttttttgtaaacttattttatagcctaaataattaatagaatctcccctttgcatttttcatgtgcaatttatgatccacaacaaggcaaatttttctttacttcttgaaacattcttttaaattatctacatttgaataagataaaatgtcatccatgtaatggtatactatagattgaagaaattacttatgtattatttccaaaggctgccacacaaaatattggcacagggtggggctatttaacattccctgtgggagagccttccactgttatcttttagtggactgagaattattgtaagtaggcagtgtgaaggcgagtttttctcagtacttttcttgtaatggtatactaaagaaacgatcttttaaatgaataactatgagaggccatcctttaggcaatagagaaggcaaaggaattccagactgtagagagcctgtttgccgtattaccttattaacaggtcttaaatctgttaccattctccattttccagatttctttttaataacaaataaaagagaattccaagggttggttggttcctcaatatgctgagcatttagttgctcctgtatcacctcttctaaagactgcagtttctctgttgttaaaggcattgcacaactcaaacaggtttgtctgttagtcattataaaggtagggctgttggtgcctatggaagattagcagctgttgcgtcctattcttgcacaacctgaatggttggtgattgttcttaataataccttcctataaaatttccagaaccatacatttatttatggcttgtttctatgattgggggaatgtttatctgaggatttccttgctgtaacaaattacatccccacaaattcattgcagtattcctctctgtccttctggccctatacatttgcgtcatcttgctcttgctctttgttttacttgagataaagttccaatccctaaaagttgaacatttaccttctgaagaggccaatttggatgacaagattcttttgatataattattatgtctgcacctgtgtctaccagaccttcaatgatacacatcatttattcatacttttaatttttgtctctgctcatttatagaagtttgctagtatacttactttgtgatttttttctgactcttttgttctctcttctgtagctcttctatcatccagggtggtgtaatttcttacaataggtattaggctctttaattgctctgggaaggagtttccacagtgataggaaaagactgagtcaaacttggtatatgtaacatgagttctaataaaagtctggagtcagataaagggagaaatgctgagagatcagagagaaggcaagccaaagccaacttttcctcattagcttcccagcagaaaagagagtgagttcctgtttcctcctgcctatattcctctttccgcccagccatctcacttcctgtctgcctgtacagacctccttacctcttatggttagctagagtcaaactccaccctctgatcttcagacaagctttatttgtacaaataatatatcaccacataatctacaaattaaccactaggctgagtgtagccaagtttcaggacatatattttatggggagttgatgtcaacctacaaatgccagttgtcaggcacttttcctggataggtggagaagctataaaatctatgctttgtttctgggttatttgttacataaacaaagtttttttggggggagaatattagcagtgctaaggattttggaaacctacctggtgagtaaagactcattttcagtagtgaaattcactaggttatatcaacaacattcaaagaaatcttactgatagctcataaactaaccgtttttttcaatctttttttttgttttgtttttgtttttcaagacagggtttctctgtattgctttggaggctgtcctggaacttgctctgtagatcaggctggcctcaaactcacagagatctgcctgcttctgcctcccaagtgctggcattaaaggtgtgtgtcatcaccactgagctgaatgaaatgatttttaagtgtgcaataattatattaaattgcatcacatatgtgcctattctacaatgcttaaaaattgtttcttatgtataagccaaggttgattgtgaatgcctgagatcccagaattctggaggtagagacaaagataagaagctggggattttgaggccagactaagctatgagaccctgtctcaaaaaagaaaacaaattgactagaaagagtcaaaattcactttaggtgaaaaaatacttagtaagaactgcaatgataatcttgcaaaaagtttgcattgtattattgtaatacttatgtggtgatatattatttatgatttaataaagccactggagatcaaaatgcaaagctagccacagccatagagccaggcagtgatggtgttacacacctttaatctcaggacgcaggagagaaacaggagacaaaagtagatggatattgttagttcaaggccaccctgagctacaagaaattgatacagtccaaaagagaaacagctcacacaaatgtgatcccagtacttggagtgacacacctttaccccagcactaagtaggtggagacagtaataatatggctgggtgcagagaagaatataaggccggaggagacaggaaccctagggattgcagtctgaggcttggtgaagagcagtgcagtctgcattgcactctgaggattcaaggagacagggtcacccattttggtctgaggtagaggtaagagctagttgctggctgctttgcttctttgatcttcatcttgaaccccaatatctgtctcggtttttattactcgtgttatacttaaaaattatatttattgtgtgtgtgtgtgtttgtaatatatgcacatgtgcaagctgtccccaaggtcagaggacaacttttaggagttggttccctcctgtcactttgtgggattaaatcaaggtcatcatgcttccatgtgagtgctttaattttttttcattttgtgtgtataggtgatttgcctgcctgtatgtctgtgtaccgcataaatgaagtgaccacagaggccagaagagggcattagatgacttgggcctgggcataaaaacagtttgagcgcatatgggtgcttcgggtcaaactgaggtctgccggaagaaaaaccagtgctctcaaccacctagccacctctacagtcccaataaaaataaatcttaaagctgggctatggtggtacacaccttgcagaggcaggctgatctctatgagtttgaggccagcctggtccacagagcaagtctcaggactgccagggttacataatgacacaaaaaagtattctttgacaatttcatacatgtttacaatgtatatattttgaatatatccatcccctattgtcctttcttatcctctattcaaccccttcttcttaacaattacatctccattttcatgtctttcattagtgcctcactgaatttaattagggttgcttgcatgatcatggatgtggggttatttacagaattatgagcaacttaacagtggttacactactgaagaaaaacaactccatttccccagcagccataaactgccaatatctcctcagaagaggggcctcatgatattgctacacatttattatattgataaaattctaataccaaaagtttcccaaagtgagccccaaatgacagggtgcttgtgtttttaattttcctctatttctgtaattgtcttcttctactttctactaatgtagtttttcactgctgaggattgaatcaaggacctcacaacattaggtgaatactcttattttatacaacaaatacctctcctccaacacaaagaaaatcttgaggttgaaaatactcaaatacagattagaagcacagctttattttcttcagcaacatttgagcaccaaactaaacaagtggcccctaagtgcctgaggaccaagtcaggcaaaaaaatattaggccccacatttaagtagcaggtactatttctggaatgttttccagaaaattgtctgcttaggagggaaccgacataaggtcagatctgagccccttttcccaggcaggcttaacgagaaactgggggcccaaagcgctttatggtgttcaccactagggcgagctggtcaagaaagttcatgatggaaattcggaggaggcgagagtcttctgagatccagtgtctaagagtgaggaaaaagaatattaagtttaaaatagtaattcttatccttctttccttatttattttggaaagagagagaatctcacgatgtagccctggctggcctggaattcacagaaatctgtctgcctctgcctcctggctcctacctttctggatcttccctcaggctcccactgtaccatatcctgcaggtaaagactggtccactgcaccaagagtcttcttagaagtcaccctagtgtgctgtctctaaggaagtgcagtcttgggtagagaatagtccagccacctacccagcatgccagactctttcagcacttacacctccagcatgcagccgctgactttaaggtctttccccaagattcctcggtgcggttcggcatcaggagctagggacccacaggcgatttctgcctccaaagaggtcgggaaaggcactgtaagggcactggtagagactcaggaaaggcaccatgttgaatcgttttcgcctacttggccctctaaaaccatctcatctggtctaagctccccagactacatcttgcacattgcttgggcaattcctgttcattccctccaccctccggttcccctccccctgttatcttctcatgcccagacctnnnnnnnnnnnnnnnnnnnnnnnnnnnnnnnnnnnnnnnnnnnnnnnnnnnnnnnnnnnnnnnnnnnnnnnnnnnnnnnnnnnnnnnnnnnnnnnnnnnnnnnnnnnnnnnnnnnnnnnnnnnnnnnnnnnnnnnnnnnnnnnnnnnnnnnnnnnnnnnnnnnnnnnnnnnnnnnnnnnnnnnnnnnnnnnnnnnnnnnnnnnnnnnnnnnnnnnnnnnnnnnnnnnnnnnnnnnnnnnnnnnnnnnnnnnnnnnnnnnctggtcggggaatcggcgccatctgcagtgtggcctaaactgtgtgctgcttgcatgtctaccgctgctccaccctccaagccaccctccgccatcgctacggcccagagcccgccttatcctccggaagctccgccctcgctcaggctgccaatcccacatgcacctgcgggaatgggcgggcgacaaagttgctaaattgggtcggtccccatctggaggcctctgttgggatctctaagagattgatctagtctccctcagcctccaaagtgccataccacatccagctttcccttcagtttctttttaaaagggatctaaggagccgggcattggtggcagatgcctttagtcccagcactcgggatgcagagagagagagagatatccaggctgtcctgaaactcacagatacaagcctgccaagtgtgctgggattaaaggtgtgtgccaccaccatctggtttaagatttatttatttttattttatgtgtataaatgttttgcctgtttttacatgtgtgtagtgcctgttgtccatgtgggtactggaactggaattatgggtggttgtaaacttttatgtgagttctgggaacttaacccaggtcttttgcaaaagcagcaagttctcttaatcactaaactatctgtctagcctctctctctgcatcacaccttcaaaagctctgagattgatcttcttcttgtctacagcatatcccccacaaaagtttctaatttctttctttttctttttcttgatttttcgaaacatggcttctctgtgtattagccctggctgtccttgaactagctctgtataacaagctggctttgaacttcacctcctggcaaatttaagatatcttttacttattctttgacaatttcatacatgtgtacaatgttccttgatcctacccatgcccaactcactcttctcactctgtctaatttctagtatagattaaatcaatgcttaaaaccctgtatattgggctgggcgttggtggtgcactccttcaatcccagcactcgggaggcagaggcaggcggatttctgtgagtttgagaccagcctgatctacaagagctagttccaggactgccttcaaagccacagagaaaccctgcctctaaaaacaaaaaacaaaaaataaccaaaaaaccctcaaaaaacacagacacacatacagaccaaacactcatacacataaacatttttaaaactcttaaaataaaaaaggtcatggtggattggatagaatttatttggtacaccatttatgtggcatttcaaggttctggtttcattcccattatcacaatcaaccaaccaacaatccctgaaacgttttctagtggcacttggaataaaaaccaaagctttgcagtagtttataagatccctgtatgatgtggctccagttccccccttttttttgcccctatgccaccacattctgtgtggttactggggccttctctctctctctctctctctctctctctctctctctcgctctcgctcttttaaagattttatttattatgtatatttattagggcaccagatttcattacagatggttgtgagccaccatgtggttgctgggaattgaactcgggacctctggaagaacagtcagtgctcttaaccgctgagccatctttccagccctctttttttttaagaaaaaattatctacttatttttattacatatacagtgttctgtctgcatgtttgcctatacaccagaagagggcagcagatcacataatagatggttgtgagccaccatgttgttgctgggaattgaactcaggacctctggaatagcagtcagtgctcttaacctctgagccatctctccagcactcactagggccttctctctactcctgagcctacccctcagcactttgtgcttgcctcttctattagtaagaatattcctaaactttcttatggcttgtttatcaacattagatttcacttccaacgttaccttctaaaaactagacacagaaatgctggcactaacagacattataagtggacataacagatatctatagaaaatctacccaaacacaaatgaattcaccttcttctctgcacgtcatggaactttctccaaagttgaccacatactcagtcacaaagtaaatctcaatagatacaagaaaattgaaataaccccttttagcttatcagatgaccatgggttaaagtggatatcatcaacaacagaaacaatagaaaccctacaaactcatagaaattgaataactctctacagaatgaaaaatgggtcagtgcagaaattaagaaagaaattaaagactttctagaattcaatgataatgaatatacaacatacccaaacttattggaaacaatgaaagtgtggtaaaagcaaagttcatagcaccaagtgcctacataaaaaaattgagatctcatgctcgcaacttaatagcacatctgaaagttctagaacaaaaagaagaaatcctacccaaaacgagtagaaggcaagaaataaactcagggctgaaattaataaaatagaaacaaaaaaaggagcagcatcagaggtaggttcgagctacaggcactgagcagtgccagtgagaggcccaaatcccagcccagaagcagcgtcagaggaagtcccgagcttcaggcctggagcagtgtcaagggaaccaagagcctcagaaccgggagcagcatcagagcccagaagctgcatcagtgagaggcccgagcttcaggcccaggcctggagcagcatcaagggagccatgaacctcagaactaggagcagtgtcagagggagacctcactctcagtcacagaagggaggagtgatcaccgggtgaagcaacagcagcactttccagcagtagcttccagaaaccattatcaaaagttcctctgggggggggggctggagagatggctcagaggttaagagcgctgactgctcttccagaggtcctgagttcaattcccagcaaccacatggtggctcacaaccatccgttatgagatctggtgccctcttctggtgtgcagatatacatggaagcagaatgttgtacacataataaataaaatcttttttttaaaatgttcctctgggaaaaagcacctgtgtcccagccagcatccactgccatttctcggtgggagatacccagctattacatcgactcagccccatggaaggagcatccaccagacctgtagccccacctgcacctcaagtgagcattgggcccacttccaccaggaggagagttcaccattagctctgctctacttgtgcctgaaggagtgatcaagggagccacagcccccaactataccaattagagaaagagagaaccctgaagcacaagctccacatataccgattagaggaagagatgtttagacaacaaggtatgaacacactgaacaatataaagagcaataaggcaccactagaaactagtggtgctatagcagcaagacctgaacatcccaacacagatgaaggagaagaaaacaacctaaaaaataactttatgaggatgattgaggcctttaaagaggaaatgaaaaattctcttagagaaatggaggaaagacaaatgaaatattggaagatatcaacaaatgccttaaagaaaatcaagaaaaagcaatcaaacaagtgacagaaatgattcaagacttgaaatctgaaatacaggcaataaagaaaacacaaatagaaggaattctggaaatggaaaatctgggtaaatgatcagaaaccacaaatgcaagcataaacaacagaatgcaagagatggaagagagaatttcagtcactgaagatatgatagaggaaatagattcactgatcaaagaaaaatttaaatccaacagatccttaacacaaaacatgcaggaaatctgggacactgtgaaaagaccgaacctaagaataatagggatagaagaaggacaagaagtagaactcaaaggcacagaaaatatattcaacaaaatcatagaagaaaactttcccagcctaaagaaagacatacctatgaaaatacaagaagcttacagaacaccaaatagactggaccacaaaaaagttccctcatcacataataatcaaaaaataataatacaaaaaatcaatgaaacaaagaattggttcttttataaaatgaataagatagacaaacccttatcaaattaactaaaaggcagaaaaagactatccaaattaacaaaattagaaatgaaaagggggacataacaacagatactaatgaaatccagagaatcataaggacataatttaaaaatatgtactacatcaaattggaaaatctaaaagaaatggataaatttttctataggaaccacttactgtattgtgggatattcaccagagaagattgctcagacatggggttaagacaatagaaaatctttattagttggttggcatctacactgggtgtttcggatctcagtgtagccccaagattttctcaggatgaggttttaagaccaaaaaaatgttctgggttgacatacttcagttaataagaacagttagccagaagcagaactgcagaaactaaaaagcaaggttaatacatgttgacactttatctgaattatatggactttgatgtattaattgggccttagctttagttttggcaggtggtgctgtctacattctgagttttacagcctgaatagtacttccatcatgaaagttagttgtcctaaggtctcagggcctattaaggtctggggacctgttacattaccaaagttaaatcaagatcagataagcaatttaaacatacctataacctttagtgaaatagaaatagtaattagaaggctcccaattaaaaaaaaaaagcccagggccagacagttttagtgcagaattctagcagactttcaaagaagagttaactccaatattcctcaaatcattccacaaaatagaaacaaagaacactgctcaattcattttatgagaccacagttactctgatatccaaacaacataaagacccaacaaataaagagaattacagactgatttcttttatgaacatacatgcaaaaatactcaataaaacacttacaaactgaatgcaaggagttgcataaaaaagatcatccaccatgatcccgtaggcttcatctgagagatgcatggatgattcaacatatgtaaatatgtccatataatgcaccatataaacaaactgaaagagaatacctcacatgatcatctcattggatgcaaaaaaaaggcctttgacaaaatccaacacccctttatgttaaaagtcctgaaaagattagggatacaaagaacatacctcaaaataataaaatcaatataaaacaagccaacagccaacatcaaaataaatagaaactcaaagcaattccactaaaatcaggaagaaaacaatgctgtccactttcttcatacctattcttttgctgttgttgctgtctttgaagaaaaactgaaggagctatcaaaagatggcaaggttcccatgctcatggatctgtaggattaacacagtaaaaatggcaatcctgccaaaagctatctatagattcaatgcaattcccatcaaaattccaacacagggccaggcagtggtggtgctggtctttaatcccagcacttggaggcagaggcagatgaatctctgtgagtttgaggcttctctggtctacagagccaggactgttacacatataaaccttgtctcaaaaaatttccactgcaattcttcacagatcttgaaaggaaaattcttaactttatatggaaacacacacacacacacacacacacacacacacacacacacacacactaacaataaaaaacaaaagaaaacaaaaatcaggacaggcaaaacaatcctgaacaataaaaaaacttctggaggtctcactattcctggtttcaagtcgtaatacaaaatgatagtaataaaaccagcatggtattggcataaaaataagcacattggtcaatggaatagaattgaagacctatacataaatccacacctgttttttgataaagaaatctgaaatacacactggaaaaatacagcattttctataaatgctgcgggtcaaactggatgtctgcatgtagaagaatgcaaacagatccatacttgccaacctggacaaactcaattccaaatggatcacagacccccaacataaaaccaagtaccctgaacctgatagaggagaaagcagggaatagccttgaactcattggcacaggagaagactttctgaatagaacaccaatctcacagacactaagatccacagttaataatgagacatcatgaaactgaaaagcttctgtaaggcaaaagacactatcattcggacaaaacagcagcttacagactggaaaaagatatttaccaactccacattcaatagaggactaatatccaaaatatataaagaattcaagaaacttgatatcaaaaaatcaaataatccaattaaaaatggagtatagatctgaacagagaattctcaatagaggaaacttgaatggctgagaaacacttaaatgttcaacatctttagccttcaaggaaatgcaaatcaaaactacattgagattctatcttacacctgtcagaacggctaagatagaaaatacaagtgacagctcatgctgaaaaggatgtggagtaaggggaaaactcctctattgctggtgggactgcaaatttacacagccactatgagaatcagtatggtggttcctcagaaagatgagaattgatctacttcaagatccagctatacccctcttgggcatatacccaaattatgcttcatcctaccacaatgacacctgcttaacaatgtttattgctgttctagcagagtcattgtatctagggtaaacattagaatgagataattgttttctggaagtacttagaccttgaagaaatcatcatggaaaacagtgattgttttctattatctatagagttgtttttatgaaggagctttacaacctttgcatgactttaggtacagtatggtcctgtcaaacttggaatgccatgcattattgagtactgcaaatagtggacaataaagactaaagttgcagggatgtgatgttttccttcacaaaacatatagattatatcaggagctttggtatgaggaacttgttttacccaaaaaacaacttttgtgtaacgaccaataaatatgcttctgcactgttgtttggggttcaagtccatcagagactgttcctccctgctgcctcagaatctgattatattctagagtgatgctctttctttgattatccctcacaactaagaataccaacaatagaacccatacccaacactgcttgggtaatcaagaaccagagactagatagcccagacctaaggtaaaaccgaatgctacttactgctctaaaacaagtggtgataaaatgactcctaatgatattctgctatattcatagatcagtgccttattcagttataatcagagaaacttcttcctgcagtagatgggaacaagtacagagacctacagcaagacattacacagaaagagggggagggaaggagagagagagagacagagacagagacagagacagagagagacagagagacagagagagagacagagagagagacagagagagacagagagagagagagagacagagagagagagagagagagagagagagagagagagagagagaccttggaacacacaactctaaatgggatgaatgggatgtctcaatcaaatttctctccgcagagctcagggaaccctgaggaagaagaagtggaaagagtctaagaaccagaggaaaccaagaaaacaagaccctctaaatcaactgagcaaagctcatatgaactcagagactgaagcagcaattacagggcctacgttggtctgcaccaagtcctctctgtttgtatattatagctttcagtttagtatttttatgggacttgtatgttaacaagtgggtctctgatttttatgccttctcttggggctcttttcattatgttggtttgctttgtccaactttgatgcgatggcttttgttttattttttgtgggggctcaaggcaggggttctctgtggctttggaggctgtcctgttgttttatcttattatattttattttgttatgtttttttgttttctcttagaaacctgttcttttctaatgaaatacagaaagggagtagatccggatgggtggagaggtgtggaggaactgggaagagcagatggaaactataatcaagatatattgtatgagaaaagaatttattttcaataaaagggaaaaattaaaaataaataagtttaaaaaatgaagatactatgatgaaatcaattactttgtagggtaatgcaaaatattacttaattttattttttgttttgtttttgagacagagtctgtctatatagccctagctgtcctggaactatgtagaccaaactggcctcaaactcaagagagactcctgtctctgcctcctgagtgctgggattaaaggcatgcaccaccatacatggcttttaactttaattttaaaatgggagaaaaagttgtgaatatatttcattgattgaattctttgctagaatgtacaaagctctgaggtcaatccctattaccacccaaaatactcaaaataagcagacaaatcaaaactgggtattgtactatatgcctgggatccaagtacttgtgaggctgaaacaggaggactgccatgagtttgaggccagcttggagaacagagagtgcttggtagtcttcctgactcatgaaacaaggaagtaaaagacaaaaaagaaaaagaaaaaaagaggagtgggaattgaatacacataattactgtgataaaattttcaggaaggctaaaccagaaaccacttaaaatacttttctgtaggagattaagatagctgctctccaagcttgtgcagcaaatgcttttacctgctgagccacctcactgtccgttttccatttttttaaaaataactttttttttttgtaaagagtctcactgttggtcaagttggtctctatgtcctgagctgaggtgaaccttccaccttagtcacttgattagctgggactacaggaatgcaccacaacgtccagctaatttggtgctctttaagtacagctctattatcatactctcttgtgggatatattctaaatacaaagataactggctttctttctttctttctttctttctttctttctttctttctttttttttgtttttttcgagacagggtttctctgtggatttggaggctgtcctggaagtagctcttgtagaccaggctggtctcaaactcacagagatccgcctgcctctgcctcctgagtgctgggattaaaggcatgcgccaccaatgcccaactccaataactggctttcttattagcatatttaatgtggataatggtctggatgaggtgagtgtgaaactattttgggtatatgtttagatagactttatctggtagaacaaatgagtaaatatatcgatgctgtcagaaactagaattttcactgtagaatgagagaaggtgtgaaagaactgtgacacgagattatggctgaaagattcagcatgaacttgtgaattcttgatatatatggatatatatttctaaggtttgtttattaaggggtctggaaatagtgacacttcactcatagtgagcacatcctttacacagatcttggtttctaaataccattctcccgtaaaaggctgatccttagtcaagggcaagaaagtatacaaggtgggcctagagtatactgtggtgctagaacaaagttgtaacagggaagaggcatgagggaatgtctcaaactttcatggctcttttccaaaaggttcagttggatgaaggatgttcaaactattctaaatgtagttgtttgggggctgttcttgtgttactttgccatgtacatgtagacatggaagaaatcacaagttcatatccaaaaccctctcattaattcatctatcccttgtgaatatccaactcaatgagcctcaccataaatgctgagctcctgaatctgccctcctgttggcccaccaaacatctcatcccagctcccacaacatttctgtgtttgggaggccacctgagctggacccttcatttctgctgctatttcctggtgtgattgtgatcacatcacatacctaggaccaaggccccaatctgagagtcaggaagcggctgtcaggaacttatattgggtagggagcagtgagtggatctcagcagggcacagtgcctatggcaaatgttccaatccctgatgaggatccttagattttagtctgttggtgtatggaaagttataccaaattcagggcaaaagcaggatctgcatcttgtggtcactctattttcaatgagttcccagcctcttatgtcccccttcctatttttcatcccagcagcatttgtcacctcttgtcttccctcctcttctctgccactcttgccctgacagaactccccaaggcttaatattgaatgaataaagaaactaaaagaaaaggaaatgagcatgaatgctcctaggcatggtggaggagaaagtttattatagatatgtgagagagcatagccagaggcagggacatctgggaagagtcctgagtgaacatatccctgaaccctgtgaaaagagtggtgagggaaaggtaggagaaccaggggcagtagctaggaggctcaaatgtacaaagagagtgagtagccaaaatggttggattatagagagaagagcagcccagtcccctgggctggagagttcaggatagggggccaagtatgccagccaggatggcctgtaaaaagtaggtactgagggatgctagagaatccggaggccaagtctgctttgatgttaaataggcatctcagccatttgtcccaggtttgaaacctatttgcctccattccttcgtacacacatcttgtggagtaacagattcttgaggattctttggctatatattaagaactccagagagagggtccaccatcttcctgtagtggcagcactgatggtctctcccttctgcaaacttgcccttgacttgcacttgacaccacctattgcccatgcctttgcctgtggctcccttctaaactcccctctggttagtgaagctggctccttgaggctgagatctctcctttttgttagcccccttctctgggcagctacctcaatcatccttccagtatctaggactctgtctacagaacattcctgggtatagcagtatggattcaagttgttcctcatccacttcttacatttggcagtcagatgagaatgaaatgagaaaagtgctctgcaaagaaaaggttcattaacaatacaagagctgactatcaaaaggagtccccttcttgcttttctggatcagcttttccattacagggccctcaattcatattttgagggcacttcactcatctccatgtccaatctcacctcccctgtcccttacctcccacatacagttaccccagcatcccaaggcaatcagatatcattggatccctttcgcaactccttcctacacttgtgagttttgtttcagccatagcccaattcctgaagaaccctttatttagtttcttgctctataggtagctgcactgcaatacataccaattgtcccataaactcgtctaaacactgtcctttctttggccaaggtgaggatcttgcaggctttgtacaccctgaattgagaagcattggctcaagagactcatgaacatgtctatggtttgtttcctctgcatttagaaactttaaatgcatttggatgcaagtctcagaaaacactccttgtctgagccctcatccctttctcctttactatctccaaggggtcatactctttctggctcagatgtttcctgtagtggagagttgccatatgcatccaccaggacatgcatttacttttccttcttggtacagctcctatgtgcccaggaaagcagatcaagactacctgagtaggtgttaactgataaccaacaaatcctttttccatatgccaagccccagtgattacacaggattcagttctgaccaataagagagcatttatttgctggggcatctgagacagaagctatgttacagagagaaagtgctccttgctggcagcaaatggtttgatgaagctgcaggcagccaccctttgatccttggaagtagtggtgaggatgaagcagatgctggagaattcagagggaggcaggaaaaaagctggatgtttggtgaaattgttcatcaactgccagtactcctgggctttttcacttttgtaagccagtaagtttcctgtgttgttaaaccaattatttgaaaccaaaagcagactagtttattaatagagttcgtcttggtaaaaagtctcacatgcaccttaagtgttatttaattttccaaatacattccctgactcaaagtgaacaaggacattggtaagcttattatctgagctgccagtccacatatgtgctcacaagcaggtccctgatgtggtaccccaggtctcagggaggagcagggtctaccagctgctcatcccctcaggcctcactttagtttatcattccattatggggagtcaagatttgtcccacaaggcccaaagcccatgcaggaggccgttgggcaagaaaggccagtgtagtcccaacaacattcagagttgcttccttggcaagagtggaggggcaggagtaatgtcctgcaggtggctatcttccagcctcaactgctcccagggggtcctcctcaaaggagctagtacttacatgacctttagcacccaggcataggttcagtgaaaagaagaaccactgtcttcagcttacatttctatctcctcctcagcaccctgagtttcttcttaagcaatgaaggtgtgcaaactgaaagtccctgtacacaggtggcagaggaagcatccgtctcatgctgtgggagaacgctgggtgaggagacccaggaagaatcctagttgtgacactgctttgtggagtcacctgctgtccctcatggatgagaccgacttccaggaggagccaagcagatagggtccccccaagaagagctatgtcacaaaggcccaggatattccatctgtggcccatgcttggctaccacttcacttttggcttcagtttgcttactgaacacaagatggcactgcagttggtgatagcagactcccaccttgagccgggaaagagggaaggaaacttattcaggtcagaggagtggtcaccactaacagactcaatggtaggggacctaagtggcacagaaacttgacttaagccatacaacggagctagggtatctttctgatcctccagcccctgactttgtcattcatcaagagcacactggctgcagcagcagagggactctggatggctaccacttggcttcctatggagatttgccaagggtatgccagacatactagaggacaggtgacagggactagtggcttcctgagggagtcacttgagtgtgtatgttgagtgggctaaatgggaatgttaaggcccatccctcaaaacaacacactctttctcctacagaggcacttctacagctggctagacttggattctggctgtcccaagccattgctaggtgtttctacagtgcagcctcaactgtcctgtggaaggcagaagagaattcaggccaagtactttgagtagtgcttagcacctagcaagaactgggtacataccagctattattatcactatgagccaaactgcgacatgagaacacatttaatgcaacatgcagctgtggcctgacctgggatttctccccccactcccagaaatgctatttggagaaccctttttccatagactcagttacttcagggtgtagaaagcggctggccaaacgttcaatgtcatccagtgttaggcggctcagagatctgtcataatcctgagaagagaagaccaggtgggttcagggggtgcaagcaggaaggggtatgctgtaataggtgggggctggggctagaaacattaagattggaggtccagaattattctgctcaccctctgtagttgttccaggaccctgctggtatctgctacactgaagtgacgggccaggactttggagatcagctgccagaggggtgggggtggggagtcgaccagtctgtgggcagacccttcttccagcagcaccttctccaaaggtttaacgactaggttgagtttagaattgggcccaatgttgtaatctgacagtcgtttctcatctgccaaagagagattggtggggttccttcctcattgttgtgggggtggccagagagcaatcctgccatggacagctagagtgaaacactgcagcatctggctatggggtggtggcgtctcagctacttttccaaggtttagtggcagccactgctctaatccattacactggcctgtacatcccgtcccccaacttccaacttcctacttcctgtggggggtccctggatggctcctttccctggttacctgttagggccttgcccttgaacagcagacgttgctggcgcacagggacgttcagcttatccgagaccagatgcttcagtgtagacactagctcgtcctccggcacctgatccggccgaggtggagaggcaagggcttagtccgaattccctgggcgatgcagccctagnnnnnnnnnnnnnnnnnnnnnnnnnnnnnnnnnnnnnnnnnnnnnnnnnnnnnnnnnnnnnnnnnnnnnnnnnnnnnnnnnnnnnnnnnnnnnnnnnnnnnnnnnnnnnnnnnnnnnnnnnnnnnnnnnnnnnnnnnnnnnnnnnnnnnnnnnnnnnnnnnnnnnnnnnnnnnnnnnnnnnnnnnnnnnnnnnnnnnnnnnnnnnnnnnnnnnnnnnnnnnnnnnnnnnnnnnnnnnnnnnnnnnnnnnnnnnnnnnnnnnnnnnnnnnnnnnnnnnnnnnnnnnnnnnnnnnnnnnnnnnnnnnnnnnnnnnnnnnnnnnnnnnnnnnnnnnnnnnnnnnnnnnnnnnnnnnnnnnnnnnnnnnnnnnnnnnnnnnnnnnnnnnnnnnnnnnnnnnnnnnnnnnnnnnnnnnnnnnnnnnnnnnnnnnnnnnnnnnnnnnnnnntgacctgttaattcctaccctgctggtggaccacatcagggcaaacatgtagtagtgtctctcagatacagaaatggtccagtcctacctgccatagcccaatggctttctacttcttcctttctagtctggttgcaaaaatatcctggccgaggctccaaagtagtggacctaggcctctatctcttcactcattatagaacagagtcctgccctgttctgatagagaaaagcctttgcagatctggagatatagctcaaaggtacaacacttgtctaccatgtgcaaagcacagaggaaggagagagtgggctctgtgcacggtcaccaagcctgttcaccatcctggtccatatcaacccagacacactcttcctatccccatccatacactccaagggacaaagactggaagggacccaagcttgcttttgtcttttattgaaatatatttctaactcagcatggcctctttggcactgaaagctggaaaaaaaaagcctggatttgtctgagtgcatagtgcatgagaacaaaaggcctttggtacagaactgtggggacagtggatggagtatgggggctggggttataaaacttgatccagggtcctcatggaacaggaaacaagttgctgtagatgaactggccaataaccaaagccagcatctcggaggtaccactcagtgccacaatgaagggggcctgagaggcatagtctgcttgaaggcgacgcagagacagctgcagcatagctaaagctagcaagctgttttgtacccctacctcaatgctgactgtccgccgctgggccactggcagcttcaggcacatggctaggctgtagcccaccaaaaggccaaccaggggcactgtgaagcccaccagtacgatgggtaacctgactcccactaagatgaagacccccatgtggtaggccaggaataggccacccaggagaagtacaaaactgaagggcttgatgacctgtagcagcagctctgagaacttagggagcttagacttgattaccacacctgctgctatggggatggcgatgaacagcagagtccccagtatcttggagatgggcacgtggagtgtttcatggatgctgagaaggcggctgtagatggctgatgaaagtggcaagaaacctgtggcagctactgttgagatgaaagtcatggagatggccagggtgacatctcctccaaggaggagactgaagaggtagctccccccaccgccaggtgatgagcaggtaatgatgaggccaagagctaaggccttaggtagcatgaagactttggccatcaggaaagcatagaagggcatgaccagaaactggcccaagaggcccaacagcatgggttgggggctctgtaggagctccttcaaaacttcaagttccactttgcacccaaatgaacatttgttgacaaagataagaggcaggagcaggtagaggattgggttctctgagaagtggcccaagttggggttgagggtagaagggatgtcttcagcaggtgacaccctgatgcagaaatctctccgttcttcaatcagcaaaggtggggtctcatggaggtccatgagctggaggtggagtggggccagcccagccagacctgagtggatgttcaccacgaagccacccccactgccccaggttatggcacttacattcttgatggtcagcacctctgtgtccagggatataaccctcagtgtagggctgaggcctgttccattggcctgtcccgagtactgactagagatcacaatgataccctcactcttttcagggaactcaaactctgtcactgaaccatccccaatgctcaaatagtgaccacctgtcagtggcacagtgtggccctgagcagtgctgaggttggcactggccatcacttgggccccccatggcaggcttatgagcagcaaggcagttccgagcataactatgagacctgtacaaccaccctgtcctcccaggccaggcaactgcttggagctacctttgcttctcctgaccaccatggcacccttcaaaggatagtgttcgtagggccctcgtgtcttaggggaacacccttgcttgtgctgttgtagtgtcctgagaagggtccatgggaaggtcctagtcctgtgtggtctttcttgatagcagggctttccctgaaaagagaaggggcaaagaaaatggctaatgaagaggagaaactgcaagctcaggagcacggggctctcaaagaaccttttacttctagtttggggatactgctggtccttgaatgtcattcagccatctcctcctccagcacagctgcctcaagcttctcagccctcaagagaggtcaccaacatatagaaaaccccactcagtctcccaattctctggacttgactactttggtaaccttactaagtagtagctagtactaagggctgtaggagagcgatctctaaccctgtcaccactagcccatttcacactagtttcaagatgctgtgacagcactgtaggaatgaactaaactgtttcctggaggggctatgtatcctggctcactgctgtcatcctagcacttgggaggtagaggcaagagaaacagcaatctaagatcatccttcagttacatagccagttccagggcagcctggaggatttgatactctgtttccaaacaaagcaaatcaaataaaaatggcttcctgggggaaacaaggacactagtcagataagaacaaagagtgctgatggtagctgggcatggtggtgtacacttttaatctcagcactcaggaaacagaggcaggcagatctctgtaagttcaaggccagcctggacgataaatgggtcccaggactacacagaaaaaaatgaagaaaaataggttgctgatgggaacattgtcttgtgccagatccaggtctttaaagaacagaatagaggagtctgaatgccatttgcctgctgcaaagtggtgataaagtgacatgggcaatatgtgacttactgaaccaaagtctgcagggcatggtgcctgctattgacatggaattgggtatatcattgctgtggcttcatgtcctgtcccacctgccctatactaatgagatgggagtccttgtgggaagcacatccctacttctaaaggaagttatagtgggagtgagttagttatccactgggcaagcttctcttgccagagctccccagtctcagaatttgagctctcatagctgttgctacatccaaaaatctctgctcaagagttttctggcatacattccccttccagaatcttttgtttgagacagtttctctgttatgtagtcctggttggcctgcaactcactatttagactaggctggccttaaactcacagagatctgcctgtctctgtctcttacatgctggaattagtatgttaccacattcagtgctaccagtctttttgttgttaagacagggcctaactgtatagtcttagctgggctgaattcagagatttacttgtttctgccttccaaatgcgaggataagtgtgagccacctaccagaattttaaacttatagtggaacctgagtatttctaagggtagagtaatttggggtgaaaggagggttctgcctccttccatttctcaactggatagtatcatcatctgctagaactggagcaactagatggccatggacaaagcaggttttacattatggctttccaggtacctttaagctatctggagcatgatcagtctttgaccctagacctaattcaatctatatggcctttgctgacttctgagtttgggtcacttaccctgagggccctggttcagccttgtgtctcaccgatgaagagggaagcaggaaaaccagagtagggtaacaagtcaagtggagatggaaagatgtaggcatcagagtggtgtggaccacttaagagagcggctaaaggccatccacccataacccatccttccagtaggactggtagacctgagtcactcactcactgcaaaaggatttggttcctatcctacacctttgctgatagaggggctgaagagttagggtaaatacactccaaggttaaggaagcaatcctgtctggaagctttttccacagcatcgaagtgttgggggttaggatatctggcagtgatgatcaggtctccttcgcacctggaaatcagaaggttgtcaagtggctggagaagttagaaacggctcacaaccctgcggtcagtcttgggttcaggagagccttcacatcactcccgcgcccgcaaggcctcatgctgggcctggcctgagcgggtaatcgcagactgcggacggannnnnnnnnnnnnnnnnnnnnnnnnnnnnnnnnnnnnnnnnnnnnnnnnnnnnnnnnnnnnnnnnnnnnncccgcccccacaggctccgccccacggaggccccacccgcgtactaggactccgccctctcactgaggccctcatctctgatcgggttcccccaggatgtgacgtttctgggagcgacgagctggccctaccacgtgagacctgacttcctgagtcagcgcttttggcgtactgagaaacaagtactttgttgtgtggttacctcctgggggaaaaagtgggtggtgggaaggtgtagaaaggatgccactcgacagtaaacaaatattgaattaaaggtgatgtgggggttgaagagatggctcggtggttaagaggtcttacaacttttgcagagatctcttgttcgatttcccatcagccattcagcaactaaaaacctcctgtaactacaattccagggggtttgatacccttcttttggcctctgcccatattggatgcatctgttgcacatacaaacatgcaggcaaacactcatgcacataaaataaaaataaatctttacaaagaaaggtgatttgtgtgcaggtggttctgttactgccatacatgcttctgtctttcaaacgcacaaaataattttgtttattttattattgtttgttttgtttacttttttttaaatgagacttttgctagttgtggtgcacacaggtggatctctgagttcgaggacagcctggactactgagtgagttccaggacagccagggctgttgacacagaaaaaccgtctcaaaagccaaactaataattataacaacaataatttgttaaatatgtatttatctggcagatggttgtgtgtgtgagagagagatggtttagtgattaagagcatatacacctggcatgtaactccagtttacaggggatctcatgctgtcatctggactttggaatcacttgcaatcatgtgcacataccaattcaaagtaaagttgagatcataaattttaaaatttattctcagttacatttatttaatgggtagtttcagactcagaaatctctcttcacagacatatttgatcttgcaaaacctttggtctctgagcttgtacataaagcttcattccattaataatatgatttttcccattgtagtgtgttctgaagttcttgtgaagaaaactgaacaaacttttcttagctgccatctgaggattttttttctgataaaagcaataagctaactgccacttgtattaagttctatagaattactgctggtgcagtcatatttagacaaaaaaacagacttaatttactttatttttcttgtataaaaaccattattgcagagaaaccctgtctcaaaacaacaacaaaacaaaaatccaacaacaaaaaacccagctggagcctgggttctctgaacagactgtggtgtgggctttcacaagattctcagtgaattcctgataaggagacttggtgaacacagtctctttccagagggtggcgtcaggtagctgtaggtcttggagatggcatcaaaggtggccttggcaaagttgcctagggtggcagtgtagcccctggctgatgtgtatcagtcatcaacactggcaatcatcagtagctacttgggcgcaggagcagagtcaatgccagtgtctctgggggcagggacgagacgcaccaacacagagccacagtggcctatcactttgcatggaacagtgtggggctttgacaatcttgttcccccagtagcttctctgcacagggacaatggatagctttgttaagatgatgtttcctcagatggcagtggctacctccttggagcatttgacaccaagaccaacataaccactgtaatccccaatattgaaacaaacctgaacctggtcctctggccagcccgaatctgcttttgcattggcatgatcttttagaacctcatccttagggatgtgcccaggaaaaagtcaataatcttggattacttaatggggtagagagagcagatctctctctctctctctctctctctctctctctctctctctcnnnnnnnnnnnnnnnnnnnnnnnnnnnnnnnnnnnnnnnnnnnnnnnnnnnnnnnnnnnnnnnnnnnnnnnnnnnnnnnnnnnccctagaactcatagaaatctgcctgcctctgcctcttgagtgctgggattaaaggcgtgctccaccaatgcctggctcagatttcttccagggacttgatcttcatatccttgaccaggaggcccagcttagtgatgtggattcactccttgtatagggctttaccttcacaagccccaacaatggccatggcctcaatcatgaccacagtgcctaagaacgctgccaaatactctggggaagctgctgtggcttcctaatcctgagtccccaggtattctgggccctctcacttcaccagcttcatccactgtttggtattttcccaaagaagcagcagctagactcatttatttgtttatgagacagaatctcagagctgacctcaaacttctaatgtagctgagagaatgaccttgaactttgaatccttctgcttgcatcatcacaacatcaaacccagtttatatgatgctgaggatcaaatgcagtgccttgttcatgttaggtaaggattacaactgatctatatccacacctctgaaaatgattgtaaaacaattttaaggtatatttaaaaatgtttttatctgtgtgtgtgcttgcatgagtttatgtgtaccatatatgcaggaaccattagaggtcagagggtgttgtatctcctggaatttgagttacaggtggttgtgagctgccacggggacactgggaactgaacccaggtcctctggaagagcagtaagcactcactatttctcttgccccatattgtatgttttataaaattcaaattagtacatacatatgacatgcaagtatgtatatatgttatggatatacatgctctaaggcagcagttctcaacctatgggttgcaacccctttgggggtcaaatggccctttcacagggttcacctaagacaggacgctcctgacttgcatacctcaacccctaccctgaactctgcagcccaggggagagttcactatataatccattcattttggttgccaattctatttgtacatttgggcctcctagctgctgcatctgattccttcccctttctcccatatctcttctccttccccatccccacatggcacagctcagtctggacatctggtctctcccagatgtcccagattctacctatgctctcccatgtatctacaataaactttttcctctaccatacttaggagcagtcatgttttccttttttcattcattcattcacctctctctctctctctgtctctctctgtctctctctctctctctctctctcacacacacacaataaaaagcaaacaaaattactcttttgaagtcctaatgacaggctgatgcttatcttcagagtatcagtaagcacaccactgtgtgtatacttggtatctcagaatgttggtactgtctgtctcaaatgggtttgagacatattgctagaagtcaatactgatagtcaggacatttgagagggctggttttctcacatgcttgggctgaagatccagtttggaaagtcaaaatgtgtctgtctgaagatgaggtaaattggccacagggagagataggtcagcagaaaaaacccagctttaaaaccaaaatcttgaatgaataagctgaaacttgcttgatctccatttggagccttataagtgtagctgaggcaatgttggctacattgtggaaacaagagaaaggtgtactggatttatattattctctattctttgagatttttgaaatttttcataatagaagattcaagagacaaatatatatttgataacatagttgtggatgtgcaattatataatttgtcaaaactcaaagatgtgggcctatgagatggctcagtaggtaaaggtacttgctgccaagcctaaggcctcaatttgattcctaggactcacatgatggaaaaaaagaaccaattcttgaatgttgtcctctgacttctgcacatgaccacacatatacacacaaaaataaatacacattaaaaagcatcaaagaatgtatagtacccagggcaaacctaatgtaaaaaaatataggttcactgattgtaaccaacaggagtctgatgggctgtttctgtaattttacctcagttttgctatgaacttaaaatggctcaaaagaaagaaagggacaatagtaatgtaattttcttttggcagtgctgaggatagaacataagactactgagcccccagaatattcttcaaatagtctggtacaggagctggagagtgttcagtctataactgtgcaaacatgaggacctgagtttgagccccacaacccacataaaacaaaaagacaggtgtggggaggcaggcataggtggatacctggagcttactggcagcctgccttgcttaattctgagttccaggccatttgaataaacaaacaaataaatagaagttgtggaatgtggtgatacatgcctttcatcccaggacttgggggacagaaacaagcagatctttgtgagtttcaggccatccagggccacatagtgcgacctttctcaaaacaacaaaacaagtaactaatactagtcctggtggaatctgctgtaaatgaggtttctcatcccatctgccagttctcaaaacaaaacaaaacaaaacaaacaaaccaaaaaccaaaaaccaaaaccaaaccaaaccaaaacaaaacaaaacaaaaaaccaaaaaaagccccctaaaaaacaaaaacctctaatgcttaattataattatctggctaagggctcaggcatattactaactagctctcacaattaaattaacccatttctattattctatattttaccatgaggcttgtggcttattacctcacatcttgcttccccagtggatacatggcatctacctgactctgtcttctttctctccataactctggattttctgcatggttctattctgcctagccattggccaaatcagctttatttatcaaccaataaaagcaacaaatatttgcagcatacagaaggacatcccacatcatctccccttttctaattaaaaagtaatgttttaattttaagatagtaacattacatataacaaaacagtcactaagcaagaattatagttataatatttagcctatttgcatttagcaaaataaaagaaaataccctatcatctatctttgtgagtctaaagttttatatctaattaatcttttatcacaactaaggaaaaactataactgtctttagaagtttatagtattacctcagtaaacttgaagtacattgtaagcaactttcaaaactttagaaatgacagagatatctggctgcctggacagtcacccaaagttctgtgacattggggcatccatcttcagcccataggccatagtatctggcagattttacagtgaagtaggaagatctgttatgccttgtactggcaaagttcatcaattggcttcttctgtgtactgtagaatgtctggcagttttctttgtgaagcaagaactctgaaggaccatcctgtcttgtttgggcaagttcaacagtcactttcttgttggtcctgcatgtccagtttatacaccatacagtcaagcattccaggtaagagcagtttcttgcacaaatgactatttctaccatgttgaaggcaaactccatgaagaccttcttcaatgcccatcattctcttgaagtaattggtgctgccagaagcagacatgcctcactgttgagaaaagtctaagttcttaaaacatttaaatgccatattctgtaggtctttgaagtgtttgaagattacctatccatctgaaatatatctctgcatatctagaaaacctaacatgactataagtttgactattatagatttgtatttctaaactatacaatacattttttttttggttgttcgagaccgggtttctctgtggctttggaggctgtcctggaattagctcttgtagaccaggctggcctcaaactcacagagatccacctgcctctgcctcgtgagtgttgggactaaaggtgtgctccaccaacgcccggcttatacattacatttttaaatgatttccataaacataataccttaaacaagagtagaaatacacacatactataacaaaattgaccttaaatttgtatagataaacgaaaatccataccaatgtcttcattcctatatcatatccccctcttttctttagaaagtgattgactatgagcactaattttttataatcaacttcctttaaaagaaaacaaacatttataaacaatatttggaaatttgggcatggctttgtagaccacttcctgctgattgttggacacagtaatcttatgggcaccctgagaaaatttatgattatggtcaagtcttggttggggtattttgtgtagttggtccatttcagccagcagtcctgaagctgtcattgatgttggatcacatgggatattatttcaggggggcttgtttgatcaaaccatatttttaaaatactttatttttattttatttgcatatatgtctgtgtgatggtgtcagcttttagagttacagacagttactagctgtcatgtgggtgctgggaattgaatccaggccccttggaagaacaatcagtgctcttaaccactgagccatctccccagcccatgatcaaactatattaacctggaaggaatccacagcttttcatcttctgtggaaacaaaagcagaacctcttttccaaagtaacctgtccttagacccaaattttgaagtcaagatacctttatgttggtttagcttagcagcccccacaatcaaatctctctctgcagttagctcattaacaggcaaaaaagttaaagaaaatacaataatatttataatgcagactctgtacattttctatctttacatggcccattataatttttattactctatttctcctttaaggaccttagtttattatccttaaattattttttatctgtgtatgattcatctctctctctttttttgggtttttcgagacagagtttctccgtgtaatagctctggctgtcctggaactcgctaagtagaccaggctggccttgaagtcacagagattctcctgcctctgcctcccgagggctgggattaaaggcatgggccaccaatgcccggcccgtgaatctgtttttattgtgtatctgtgatcctttttttgaggagaatttttaaaatgttaagcaggtgtggctagatctaaagtgacagctttggctgttggctttgccatgttctgctttccaacatggaagtagcaatgagcatcatgcttaccactccccacctcccccccccactgttgccctccaggaacctgtaatactattttccttctcaagtctttgatggggttgaagactagatggctccagttacaatccttatattttaactaagagcatatgaggtatgagagtcagattcttcaggataggacagctatcagagtaatctctgtaatttgtcattcacccagtctggaatttagtatgtgtttcttacttgacaatgttcttgttggttgtagttccagttttgtttgttattaccccttctttctcctggaaatatttgataatcattctttttgtatacagttttgtattaggtttagaaccttcttatttagacaaaaaaggggaaatgtagtgggtatttcctccatccatgaccttgggctatctggcctgatagaggcaaagcttctcacctgcctatgtgacctcttagaaaggaaggagggagggggtgcgctctcttgggtggtgaagactggtcaggtggcatgaagaagtgtgtgatgggtctccatcttaccaaggactgttacgataaatctttccgccaaaagccgccggagccccaccgccacatgtgcactttacgccagctgcctgcccgagttagggcccaaattaatacacagaaacttgtattaggtacaatgctgcttggccaatgactaggattcctcatctgttagctcagtcttaattatcataaatctatatattttataagacttatagaggatgcctttcgttggggccctctcttgctggtggctcacatcccgctgctggaggaggcaaaggggaaagagaacatttcctgtttctcctttcttaaatatgagtctccttgctatgtcacttactgcctggaacaccacttctctactacatttcccagaatcctctttgactcctagccctgcctaacttgctgcctcattgacctcatttctctactacatttcccagcatcctctttgacttctagtcctgtctaacttgctgtctcattggccaaacaagtactttattcaataatcaataaaatgaacatacacagtacattccccatcaaaggactgtgcaactggatttatcatatcctgtattcatgagtgtatttccctttttcatatcttaataaatccttgttaccccttaaatacactacaatctgcctttaatctcagcacttgggaagcagaggcaggaggatatttgcaagttctaggccagtcaaaggtacagtaagaccctgtttaacaaacaaatctccctctgaataacgtcaacaacctccaccaaaaatccaaacccaaacctgtggtgatatattatttatgatttaataaggattgcctgaagatcggaaaagcaaccagccactagctcttacctctacctcagactgaaaggggcaatcctgtcttcatgagatggaattaaaggtgtgagctctaattcttttttagaccgattcaatcttgtgtaggccagggtggccttgaactcagggagagccatctgcctctgtctcataagtcctgggattaaaggtgtgtgctaccactgcctagctctatgactagctagtgtggctggctttgcagtctaatacttcaggcaatctttattaaatcataaataatatatcactacacaaacccaaaccaaataaagaacccaaggtagacagcatctggcctccatatgcatatagtgcatccatatgaacacacacacacacacacacacacacacacacacacacacagagagagagagagagagacagagagagacagagagatagagaaacagagacagaaactgtgtttgatacagacttagagggctggatatcatagctgttatcattactgtatctgagacaaggagctgagccctgctgactttcttgtttgacccttttagtctgggacacacaactctcttttcctggcatgcctctcctcgtgggcaccccacacctgccacgaaatccatccattccttttccttcccccccctctctctcccttttctctcttaatatttacttatttagtgtatgtacctatacatgtttagaggacagcttgcaggagttggttctctcctaccatgggctctgggaatcacctggtttgctagcaagtgcctttatccaattgagccaccctacagacccaccccccttttggatgcagcacctcatgtagcttagactgtcctggaatttgctaagtagccatggtttgattttaacttttgattctcctgcctcattcatcttcctaagtattggaataatagatgcatactactacacccagccctactctcatttcttttttcttaaagattttatttatttattatgtatacagtcttctgcctgcatgccagcagagggcaccagatctcattacaggtgattgtgagccaccatgtggttgctaggaattgaactcaggacctccggaagaacagtcagtgctcttaatctctgagccatctctctagccccctactctcatttcttaatgactggtttgctctcagcattttttttctgagactccgtagttaacaccaatgcattaaaggcttggagagcaagttgccacagtaggacagaagtctaagtttatcacctggcatggccacctcagggataccttatgagctcctcaaattactatgccttgatgtcttccacccaggaagtccaagttttgttcactccattctggaacccggttgcttctgcactcctggagttgatatttcagtgcctgtactggttttaattcccatcttcctccctataggctcacactgggctactgagagttggtgagcttctttgggttccagagtacagagctatctttctaatcaagaccataggagatgccaattggggagccactctgcctcctatgtgagtcacatctgagctacagggcctgttgacaaaggctgtctgcttaagttccaggagcaacaggttggtttatcctctaggactcatctgtcccctccacacacaaaggacaacatctgaatacattttattccattgccattgattagtttattagcaaacaggtcatttagaaggtgagacctctgacaaactgcatattgccatatacttgtgagaaactttgattggactccagctacttgggcaccaaaggccagtcctccattcatgtttgcagaagtgacctgattaagctttgatatggcttacttaaaaaggatcacactgaaaacagggttggatggcagtgcagtgcctctgggagggagaggatctggaaggtgtcccaacctaccctctggctgctccagtgaaaggagcaagcactgaagacccttgcctctggggtcactcaagaaacagaagatgacacaggaggggcagaggaaggggctgggtggaactgactgtggaatcaattttaggaaaacagggacacaactacctaagctccatagcaaagtgaaatgggccagccctgcagccctaataaccttgaggccactttcaagccctgatgtattggggcaagggagcctcatgcttgggcatgggacaaggccttcaccctacactggtgccatgctgcctccttcagtctggtcccagagctctgctgtgctagcccaccatgcttcttcgagggatacagccttccatctccagggcctctggccagccctcatacttgttggtgtgcttactgttcttcacatgctgtagggattaacaggaagttatgatctggccctcagtggccagccaccagggtactctccaatctgttgcccttctcttcatgcagggaaaacaggggatggctgaagtggtctattctctcacacatgtgaacttgggatgagccatgggcctgatgtataccaggatggtgagcactgtgcacaggagggagtccatgtagccctggcttcagggaaatgctggaagctgctgcccaagtttggagtgaagggtcttggagggcatgagcgtgagttgttgggaaactgggttgtgacaaggctaaaatggtagtgagcatcttgtttttcccttttaatccgagacagtttctcatgtagcccagactgtcctcaaattttctatatggccaaggataatcttgaacttttcattctcttgcatttacctccacagtgttggtattacaggtgtgtcctcatgcccaattttatgaaatgctaagtattgaatgcagggcctcatgtatgctagacaaccacccaccataaatgagctacatccttgaactgagcatcctgaaggtgtttgtgaagaagttttcttagttataagtctggccaatgtgcaatctgacttttaaagtatctttaggtcgaaatacatacaggacagggaatatcaaagttactgtctctccctgtggtaataacaaggggccagggctaaccagagcacaggtcagagacagcgctcagggccctgagggatagaattcagggaaactttggtgtaaagagaaggggtagccaggttgccaggactaggggtcagaagtgccagtttctctgctgtacctgctcaaaggggctcttgttctgcacacccttggctcccacaaacacccagctgtcacggaaggctagttccttggcgttcctgctgcccagctcagaaaaaagcttcctggtctcttcattcatcctgtcacacagtaggaagaaatgtgaactggggactgttactgtactgggacaacactgaagctggatttggcagtcacttactttgtagctggatcatcataggatgccacaaacactagggtaccttcatgcagtggccggatgaacttcaaaagatcattgacatctggtggagatgggcccacagaacacagagcttcagtttccactgagaagcccttccccaccaaacaacattcttctaatgaggaaaacaatgtagggactaggcaaaggctgttccacatcgagggctaccagtatgagcataggcaaactggtaaagaagcgaggccatctggtcacaaaacatagactccagacagagatcccccatctctatattttgtgaggccaaagctatacttgaaaagctgagtgcaaagacacagaaggcagggcctcagggaaaaaataataggatgctgtggtagccactcacctccagcccacatgtcaaaggctctggcttccaggagctcaccactgacccctgtggcaagaagaggaagacctgctaagcaaactgtttgggccatgctacctttctgttttaacccctagcccaggctcaagtatagaagcttgcagcccttccagatgcttcaaacatgctgtcatcctctcattcacagagctgcagcccatggagcctctggcatgaggtcctatgcacccaccactactatcatgtttttgttaactgggtgacctcctttctggagcttttggctggcatagaatttttcccaagcttcccctggagtgcccagaagccacctgcacctgcagagggagtaatgaaatgaagggggcaggccatatcatgatatctgcttctatggtctgaactctgaccccacaacatgggggactcaccattcaccagagcgatgttcagcccacggcccacattgtccttgacgctgctcatgagcctagcaggaggggcagaagatcccttgtgggcatatcagattttctttctcacatagctgttagcccttggcccttgcaggcctggtctcaagttccctcccacttcccagcccatgtgctcacatcttgtcctcgaggcagatcttgggcccgatgacattggcagccccgcnnnnnnnnnnnnnnnnnnnnnnnnnnnnnnnnnnnnnnnnnnnnnnnnnnnnnnnnnnnnnnnnnnnnnnnnnnnnnnnnnnnnnnnnnnnnnnnnnnnnnnnnnnnnnnnnnnnnnnnnnnnnnnnnnnnnnnnnnnnnnnnnnnnnnnnnnnnnnnnnnnnnnnnnnnnnnnnnnnnnnnnnnnnnnnnnnnnnnnnnnnnnnnnnnnnnnnnnnnnnnnnnnnnnnnnnnnnnnnnnnnnnnnnnnnnnnnnnnnnnnnnnnnnnnnnnnnnnnnnnnnnnnnnnnnnnnnnnnnnnnnnnnnnnnnnnnnnnnnnnnnnnnnnnnnnnnnnnnnnnnnnnnnnnnnnnnnnnnnnnnnnnnnnnnnnnnnnnnnnnnnnnnnnnnnnnnnnnnnnnnnnnnnnnnnnnnnnnnnnnnnnnnnnnnnnnnnnnnnnnnnnnnnnnnnnnnnnnnnnnnnnnnnnnnnnnnnnnnnnnnnnnnnnnnnnnnnnnnnnnnnnnnnnnnnnnnnnnnnnnnnnnnnnnnnnnnnnnnnnnnnnnnnnnnnnnnnnnnnnnnnnnnnnnnnnntcagcctcaggacatggctggggcaggccgcacttgtacttcctggtccttggttctgagtaatgatagcagatgtgacccatgtgcctggccctggtgttacctgagatctgagggtagaggtcaggaccagccacatgactgaaggagcagccacagagcatggaactggggaagacagtgggtggggctcagaccaaagctgggaatgcttccaagtggtgtgttggcaagggagtaggaactccaagaatgagggttttttgctactggtaggaaaagggaaagggggttgagagctggcttggaacacttatacaatcagaactaagcagaggtccagaaaatcagggtggaagctccatggataaggcacacagtcagcaaagtagatgaactggggtgggtgggtggagcatgcgagctctgctagcctctggatttcttcagggtgagggtggggatgacctctataatggcttggattataactctacagaaaatatactggagtctgaattcccagtttctcaggggtcttgctgggaaacagggtctttacagacagataaattatgatgaggtgtcactggactatggttgagtccttaatgcaatgtgactggtgtcctcatgagaagaaaagaggtaaaaccacacagaaggagattctgtgagacagtacaggaaaaaggtagagtggtacagctacaaaatgaggaacaaagaaggcttctaggatctgcagaggcacaggaagacctttaactggagctttcagtgggagcacagccctgctgacaccttcattcatactcttggcttccagaattgtaagaaagtaaattttggttgtttaaggcactatttttcataggatagcttcaggaagctactataggttttggtgccaggaattgggggggttatgtaaataaataccacaaatacctaacaatatggacatggatttggaactgggtagagtggataaaggatgcagagctctgaggtatatagtagaaagagcctgtactgcttaaagaaaaaaaaggaaaaaaaaaacctgttggtaggaatacagagtaaagccaggtatgctactgaatagctgtaatcccagcacttgtaaggctgtgtaggagaatcatggtttcaaggctatcctgggctacacagtctctgtgttaaaaccaatttagcaagcaatatggatagtaaacacagttctggtgcaatctcaggaagaagagaataatagagaagttttttttttttttggttttgagagacaggatttctctgtggttcattttaagatgagagcagacagagaagttgggggaaaaacattagtcatgaaggagctagaacataaacataaaaaacaaatcctagtacttgggagatggaggcaggaagatcaggaatttaaggttattcttggttatatagtgaggttaatgatagcctaggattcattaaaaccctgtcacaaaagaaaggagggaagaaagaaaatgttagcctaattgtattgtaaaaactgagaaagcagtccaaacctgtaatcccagcatttgatatggtaacacaggaggatcaccaagagtttgagaactacatagtaaattcaaggccagtctgtgctatagagtgaaactctatcaaaaaatataaactattttatgggctaggaaaatagctcagtgtagagtatttgttcagtatggatgagatcttaggttcaattaccaacaccataaactttttaaaaaggcattcttgagagagaacacaaagaggatggctggcttagtatttactaaagaaaggaagcatgtgattgtggttatgcttccacctttcagaagcctggacttgatatgggattatacaggatggatctctggaggactcttttgtcttataacctggcccctcataaatcacaggagaggctaggaaactttgttagaagtttataccaacagaaacactcagcctatgaaaagaacaagagattagaaggaagaaaggaaggaaagacagaaggaagaaaagaaacaaggaagggagggagggaggaagaaaataaggaaggaagattctgaatatagagccaggaatgaagaggccaaagagggaacccaagacaaagggtgacactatctcccattccagaggatggggtcactttagtgggtctacaagcaaagtatatggacatacacatttctttttaggtcttgaaatctagaagaattgccctgctatgtttgggatttgcttaggaccatgagtgcccccccccctttcccaatgtcttccatttggaatggtaatgtttttttcctttgtctgctcctctcacattctgatgtaactttactaggttgacagcacagaaggctatgatagctagtggggaaaaggccagatgaacaacaggaatcctggtgggcttggctggcagtaggcagggctgtcacaaaaggcagtatgaagttctggcacaggacaggatagggaagggacaggaagcttacctgcagtcactgagttctctgggcctgtggatacagagagttgtttctgttagcacagaggcctccaggaacctacagcagaccagccaggatcagggacttggggtcaagtcaggctacacttggcatattacccgctcaagtctcaatgatgccctgatgtaaaattgcctgctccaggaaaaggatgaattggaattgtaaatagtgcttaggtgacttggcaccagtgacaagatgtagagtcccttgtgtatctcagagcccagcagaaagtccaagatgatcaagtgttcagtggaagcctttccactccttactctcactctatcaacttccactcaatattggattgcaattagggtgtgttgctctcatatcagttggtagggacaaggctgcatttgtgttagaagataggctgaaggtagcaaaaagcctgtcaagaaggtgatggaaaacccagccatcacaccccatattgaacacctgtacagtgagtcaagagggtccccacactcactggtgaagaattgttgaattcgaggaaggccaccaccaggaccacccaggaggatggtgactaggatccaggagagacccatagtgatgattagggccacgatgcgaagggggcctgcaggcaggacagacatagggcaggtccatctcagacaccagtgaagaaacacagcaacaacccactgcctcacatgactagatctccccttctatttggcaacaagtgatggcaggatcgaaaggtggaggaaccattgctacccaccagacccaagtaggagacatgaaattactcctggtggagggaagaaagtgagtttaaatgttgaggttactatggttttccccagcaggtttggaaggactttttagaactcatgctctggacaggttccatattaccaacctcagcatcttgcctctgaaactgtcagtgtatttacagctcacccatctgtctctcctttcctcttgttctgatgaaagatctaaacttttgaagaccagtacttctgctcgcttcaagatccatcaagttctctcctgtctcaggtatgttgtgttaaggctccttctttctatttcactttcataatattaacaggtcctaacttaataacataaagatgaaacagagctcctgcaagaaaaatctcatcctttaactcctcaccttccacttccccaccaaattctttaaaactttattctttgctggggatatagctctgtggtacagcatttgtccagcatgcatgagaccctgagttccatccccagcatacacattaaaaaagtcatctacattgtgatttctatcatctcaccctccactctcccaaaattcatccaatgtagtcttgccaccacaacagcaaacaaatgaccttccaaaccagaccacccatgactttcatgatataacatttctgattgcctgcctgctctttgttgacatctgggtgggctaccctagccatcctgatgcaaacacttcactgctagcttttagcacagtctcctgacctgagtctttgggactttctcttttttggttatgtcatcttccattactctttcctcaaaagctagtcttttccaggctgccttctcctgtctgcatactctctttatgggagatttcatctaccacaattatcaagttaaacaccatgcagcaatgacaccttattttctggctctagtcctgatcaatcttgaacccacatcctccctgtcagttccttatagcccttaccagcccttatctatgaagttgctaccttatcagttcttgaattgtactcttaccccaatcagtctgatccacgaaccattttcatccccacaaggtatcttagttgtacagctgacagcagccacgcctctctgctctactctccacccctccccacccagacactagactctttggaacctctttctcacaagtcattttccaaaacgcaactggcctgttacttgagttgggtgtaagtgactatatattaatccttaacttatagtttgggaagctgaaatcttcataggtgaaagaatttgctcataaaataagtgtttgtgcacagtcatccattaataaataacaaaccagtgactacctgggcccctcctgacacaaccactatgacgtctggactctcttccgttcgctgtggaagccacccacctgccaacctcatgtccacttctcccactgggttgggacctccggcaggtgcactgtttggggaccgtgggctctgagaggaatgaagcaggagagtaggttgggtggtggggtagggacaagtctgtgctgggcacgatcggtgctacaacttgttcctccagacaccagaccaggctcagttcctcgtgagcactgggagaagcacttcctagccagcagggctttggaaacccgtcgcggctctcagtctggctaacagaagcctccaggactggaacgtagcaattgttctccctgactcgggcccctcccgtgctaggcccggggatcgggtcggtcctgttgaggctgccggcagagacccggcaggccaatgacgctgcctgggtgtagaaggacgcagattggatcagggattttccagtggtctcgatttgcgggcgaggtgaagcaaacgagtcacgcagagaagcttggccagcacgacaatggcggcccagggagggtcacagcccacaggcgccgctccgccataagcccacaggctgcgctgtggggccgcaggtccccacgcaggctccgccttcagacccgcctcctccctcttctccagaggctgggtgggaggtgcctagagaggctatttcccttcagcttgtactcaagctgagccacctagcttcctggaaagagcctgagtcattgctgccagatgaatctcctatacttttttttgagatcggatcacaccctatagttcatgctgggattacaggtgtaaaccaccacagccagcttccccgctgcctccacacgctctgtttggcgggagatcttctatttatacaattggtgagccgaagctctgcttgagacttgagatcagagctctcatggctggtaagagaatggatctggggacgtagataatgacattaggttagcatgtgttttttaagaacacggaaagtccagaagcacatgtggaggtaaagcaaagcctgagtcccagagagtggccctttggttgctttctttctgctctgattttttccccagggagtctttttttttttctattttatgtatcactcagtgtgggatgtctggaatgtaaccctcgttcctcttgcttgagctttctgtctcgaccacctacactgccagggcagctgagacagttcgttcagctggaatcatctgtctcctcaggcagcagctggacagaagtaaaacagcattcctgtcctttgacccaatgatcccacttacaggaactccaccacttttaggtaatgctccaaaatatagaaaaagtttatagaagcactgttttggttagaacatagcattttcaattttggtacacctgtaatcttgctacctgggaggtggaggcaggagtatcaagagtttaaaggcatcctcggccctttatcaagtttgaggatagactgagattccttagaccttgtctcaaaaaaaaaaaaaatggtgggatagagatggctcagcggttaagagcactagctatttttcagatgtcctgagtttaattcccagcaatagtgtctcacaatcatctgtaatgagatctggtatcctcttctggcctgcaagcatatacatgtaggcagaacactgtatgcatactaactaactaattcagtgtcaatcatttgttgttgttttcgagacagggtttctctgtggctttggaggctgtcctggaactaggtcttgtagaccaggctggtctcgaactcacagagatccacctgcctctgcctcctgagtgctgggattaaaggcgtgtgccaccaacgcccaactcagtgtcaagcattttttaaaaatggtggtaatggagtcaggtgtgctagtttatgtctgtaatcccagcatttgggagacagaggcaggaggatcagaaattgaaggccaatatcagctaaaagtgagtttgtggtcagcctgaagtgcatgaaaacctatctttaaaaaaattgttgagtggtgatggtacatgcctttaatcccagcaattggttgtagtgatattgtgtttatacgcttaacaaataaagcttgactgaagatcagagggcagagctagtcaccagctaaccatagaggtctggaggtctgtacagacagaaagtgagatggctgggttgagagaggaagtgattaattaggcaggagggggaggagacaggagcttggtctcttttcagtatgtggatttttgtagagataaggatatgtaaatatgagtaattaaaaataataaaaaattaaaaaagagctctagtggctggatgctctgcttctctgatccttcagttttcaccccctaatatcatactctggactgttaaattattaaggcctattagaacttgtgtaacatattggtgcccaacttaaaggcatgaactcatggaaaagccacttgtctgtggctttgagcaaccagcacaggccagagctgcatgaggggctcccgctggagtcactgccccccctgcccggctaggttttcttttcttttttcccaagctcttagcaagtttgggattttcttgtagcctctctaaaacagtttcaagatgccacccaaattccagaggcatgtgggttccaaacgccacaggatttacctaccctagactggctggctctgccttcaggcagctcccataacacatgcttcttctgcacaattccttgtgtgtttttcagacagcctgctttcccctcccttgtgggttgcaggctttccctagaccacctctccttgggctgccactctcagcacatggctacacactagcagctgcagctgtcctcagccaggttgtacaccacctgtattctctgatcagaagtgctatgcagctttaagccccaccatcttccttggaagatttggtaagacaactgagaattattaaaagggggaattagttaaaaagagagagagttttccccatattaaataataggaaacactattacagtgaagggatttaggtctctgtatgataatatgctggacagtttgaaaatggaacaattaaatgagaggatagctaatttagatgggacttataaacatcagttttatcatttttgttttaacactaaaaagttggttaatatgagtgctaagatacaagttttagaaaaacttaataaaacagattttacagatagtcagacccagacagaggaatttaatggagaaacaatttcatcatgcattacaaggttagagaggaacagcctaaggttttcaaacaaccaactttaatttatccagtcaggaactgccaaatgacagatatcgccaagggtgctcgagttaaatggactcctgtggaaatgttagttttaaggagattcaaggaagcaacagtctcatatggcatgcattcacattttgtgaagcagatgttaaactcatgggcaacttgtaataggattatccatagagattgaagagactttgttaaagctgttttagagtgtggtcctcaattacaatggaagacctggtgaaaagatgaggctaatatcttagaatggatattttttttaccacataaacagagtaaaaattaaaaacttatgtggaaaagatctctgagtagttgattctaaaaggaaaattgagacttcatcaattagcaggaatagacccagcaaaaattgtagtaccagctgggcattggtggcctatgactttaatcccaacactcaggaggcagaagcaggcggatctctgtaagttcaagaccagccttgtctacaaagtgagttccagggcagcctccaaaaaagcaaaaaaaaaaaaaaaattgtagtacctttttactaatgatgaaattgacaaattatgggcataaagtgaatcttagtaaagagtttacagtaatattttgggagagatttacaacaactatcccaaaagcaagagaattcaatttataaagagaactaactggatccctccttgcattgtatggggaacaccaatatttggagctcctacattttatactgatgcaaacaaatcaggaaaagcaggttacaaatcagaaaatttaagtaaagtggctcaaaattcttatgattttgtccaaaagtcaaaattatatgctattcttatggtattaatggattttatggaacatctcaacatagtcactgatatgcagtatgcaaaaagagttgctttgcatattgaaactgctgaatttataccagatgatacagaattgactttattatttattgttacaagaaataatcaggaataggaatcattctatatataaaacaaacatctaatcccatggccctctagcacaaggtaatgatgaaattgatcaactattgatacacaatatgctggatggtccttcaaggttcctgctttacagaagaaagcaactgatgaactttgccagtacaagacagagcagatcttcaaatttcctactttattaaaaagtctacccgacactatggcttatgggctgaagatggatgccccaacattacaagagaaactttgactgtctaggcagtgagatgtctttgtcaattcttttttttttattcttttattagttcaaattaggaacaaacttgtttcacatgtcaatcccttctccctctccctcccctccagtctttgtcaattctatagcttatatattatccttctggggtctttgatggagttgaagacagatagttatggttatggttttccttagttatgataagatattgttacatattaaactttagagtcacaaagataggatagatgatagaatattttctttaaattttgccaaatgttagcaaactaaatattgttaactatagttcttgcttgataactgttttgttatgtacttttactatgtcaaagttcaaaccttcttttttatttagaaagaaaagaggagccaggaggtggtggcacacgcctttaatcccagtactcgggaagcagaggcaggcggatctccgtgagttcaagaccagcctggtctacaagagctagttccaggacagcctccaaagccacagagaaaccctgtcttgaaaaaacaaacaaacaaacaaacaaacaaacaaacaaaaaagagaagatgatgggggtgtccttctgaatacatgtttcccttattggttgatgagtaaagctgttgcagccaatagacaggtaagatgtagccaggaaataagcataggtggggctaccagactaggaaaattctgggaagaggaacgcagagagaagttgccagagagatgccatgtagctgctgagagagcaacagggctgggcatcaccagtaatcaaaggcaaagtggagatatacagattaatagaaatgggttaataattaagagcgagctagccaaataagaaacccgagccatcaagccaaacagtttataattaatagaggcctctgtgtgtttatttgggactgaagggtggtgggaccaggctaaacagaaactccgtcatcactatgataacaccactaagttgaaaaacaccacctaaagatcagctttggactataaacagctcaggacaattttgaggtggctagctgaggtgatacagccctgcagactactctagccaggactcgagacaagccctgcactttcccattccgcagagactggacaacaaatgatacagctacctctctcaggacttggcaattaacccatttgtttttcttttcaggttctcctaaagatgctgtcatccccagacagcaggaagtaaaattaagaatatgatgtccatattcccaagaggcaggttgtgtggtttttggtccttcattgggtgttacgggtatctgtcattgtttaggagggctggttacaagttgttattggtaatgttcaggaaaaaagttgaacaaaggagattggattcagagttattgttttgaaaaaagggggctatatatatgatagggtataagggtagattgttgaatgtactctagaaagaaataaagggaggtatagaaataggataaaaaggtagatttttttttggtttttcgagatagggttctctgtgtagctttggagcctatcctggcactcgctctggagaccaggctggcctcgaactcacagagatccacctgcctctgcctcctgagtgctgggattaaaggcatgcgccaccaactcccggccaaaaaggtagattattgaatctattttttttaaagattttatttgtttatttgtatacaacattctgcttccatgtatatctgcacaccagaagagggcaccagatcttgtaatggatggctggtagccaccatgtggttgctgggaattgaactcaggacctctggaagagcagtaggtgctcttaaccgctgagccatctctccagcatcctgaatctacttttaaaccccccaccaaaaaaaaacaactactagttttaaatttttacattggcttgtatttttgtatattgatacaaagttgaaattatttttgttagaacatactgtacatacatttctaatcttgttaaagttattgtatctatttaactcatttaacagtgtaattcaaatttttagcccttgaaaattattattactatttaggataataaggaaatgcaggttaataattagtcacctattacaatcaaacttgtaataatcgtaagtatgtcttcaaggtcaaacagatatgttttagatagacaggtcatcttcaaacacttgagaccttcagaatatggtatttaagatgttttaataatgtaagttctttttcttcttcttttttatgacaataagacatgtttgctcctgacagcaccaatctacttcagagaagatgatgggcattgaagaaatgccacatggagtttactttctttgtggcaaaggttagccactgggagacaaagtgggcaagaaagtgttcttgcctctactgatgatagtgtgctgtccaaattggactagcaggatacaaaagaaaggactgctgaacttttccaagacaaggtaggacagcccttcagaatattctgcttcacaaaaaagtctgtcagacaggcctgtaggctgaagatacatgccccaacgttatagaggaaccttgggtgaccctcagacagctgcatcatagaaaagtcctgctaccataccacatgggtggcacgcacaaaatctctttgtatcttgattgcaatagatattatatggcacagacacatgtgtatgtaggaacagggtatacatgggaaatcccatacattatgctcacttttgctgttaacctacaattgttctcactctagtttgattttctattaccatgacaaatattatgaccaaaagaaatttaggaaatgaaagggcttatttcatcttataattcccagataataatctatcactaagtagaagacagggcaggaatttaaggcaggaatctgaaggcataaactaaagcagaagacatggaagaatagttgccagtttgtttccaggctcacattcagttaccttttttcatacagcccaactgggtctacctgcctagagatggcactctaggcccacaatgggctcagtactgctgcatcaatgaacagtcaagaaaatacccccccccacagacattcccacatgtgaactctatgcagacaattcttcaagtgaagtgtcttcttcccaggtgtgtcaggtagacaacaaaatgagtctggcaacttcactctgtgttcctcttcccagaatccccccccccccccccccccccccgcggcgctggggggggggggggggggggggggggggggggtggggggttatatttgggaacaattagggaaaattttcaaagtcttatgtttggaattaaatacttgttcccagctattttcattggctggctgtagaagggaacattttgtggtttctgtcgttttgtttgtctcttacaggtgggctattgcacacaataaccaggaactaggcatcctggaggctaagggggagggtttggtctgtcctggagttcctctgtgtccagcttttctgagaatggagttaaccttgctctttcagggtgcacctttgtaatcccagctgagagactgaggcaggaggattgcaagttcaaggcctgccttggctatacaacacattttagaccagcttgggttacaggagaccctgtctcaaaacaaacaaaaccaaaactgcactaagggcctttgaggtgtttagtatctttgtcagtcactctccactttattttaattaaaaaaaaaacttttttgtatgtgtgtgtacatgtagaagtcagagaacatctttgaagatccaattctctccatccacttttatgtgggttctagggttcttacctgctgagataccttgccagccctctatcttacatcttgagatgaagtatctcactgaatctgagacttgccaatttgctcaggttggctggtcagtgagctatagggatcctcctatctttacctccccagtactaggattacagatgatcactgtcctgcctggcacatgggtgctggacattgaactcatgttttcatgtttgtgtgatgagtactttatcaactgagggagctccttggctctgacaagcccccttagctaaatttttaatttttttgagacagggtttctctgtgtagtcctggctgtcctggcactcgctctgtagaccaggctggcctcgaactcacagagatccacctgcctctgacttccaagtgctgggattaaaggcatgcgccactactgctggacttcctggttatgtttctctctggctttttgtagtttccattattgtacttctaggtattgatctcttttggtgcatcctgcttggaattggttgtgttctgtacctaaagataaaattacagcagtttgatttcattatatttatttatttagtcttttcatgacagggtttctctgtgtaataaccctggttgtcctggaacttgctctgtagaccaggctggccttgaactcactgaaatccacctgcctctgcctcccaaatgctggaattaaaggcgtgcatcaccaacacctggctgcatccagagctcttaactgctgagccatctctctagccccaactttatccttaattgccaattttttattattaatcaaagtctgcagatctattctcagacccagtgcagtgaattacctttatgtcaaatttccattcttcatttttaattttgaaatgtggtgcttatgtttctcagactggtatccatcttgctgtatagacaaaggtgaacttgaacttctttctgatccacctccctagggctgcactttccttaccccttgcttgtaacctagtattcaagatcctacgtgacaattgagagtccccatctgtgtttttgtgtcccagagttgaaatggcagctgaatgacttcacctattcatcattctctacagtatagggatttcacttgaatgccatcatttggaccttcatttatgatttatgtggctacatggatctgagatggtctttgctgactattgagcttcactgtcatggccccgaagtagaataaggtagaaatgaccaattattagacattcgtttgttgatttatttagtgatttgtttaaagtactgcttgtactgcctatttgctaagcatgaatgacttcacttgctacctggaacagaatgacctagataaatggctgaaagaatgggtcattgcccttaacaacctgatgactgccacaaaggcttctgtaaattctgcttgcttgacaacaccaccttgtggttttagagtataaaatgaaaatgcaaactagacccagtattgaaacctttcaggagctatcctggctttacttaaatggtgacatctctctttcactctcatttgtgtcagcatgcttattccagaaagattcctgcaacattgtacctctcatttctgaagtgctgtttgcttattgtgtgtttggtcctcggtagagactcacatctgaatgattagctgaatgtactcacttctctcttgtgcttctctgtgttaggaccctgcagccaaggtgaaaggcaactaaacctgggccttcatgactaccataatctgcttatccagagacagccaatgttgtagcccagacctaatgtctctattctagtgcaactacaaacacctgagatgacagttgacttccatctagaagtccccggtttcattcagtataggtattcaaatattctatgccagtggaactccccagattagcccatgaatctcagcaccaatgttggcaccagacctaaggtaatgtactggagaattggcttagtgcttaggtgtgcctgctggtcttgcaaaggacctgagtttggtcctcagcacccacatcacacagttcacatttcgagttccagggacttgacaccctcttttggcctccaggggcacctgcatgtgcacatacagacatacacataaataaaaaataagcatatattttaaaacaactaaggtgatggatgactctcctcagcatatctgtcattttttcccatgtggactcccatagctgaggtgacccttaacccatgggaatctcaaatctcccatcaattgactgtgctcatttggtccctcatgattgtgcttcagtgtaggcattcagagctgaggtgacctgtgaatatgtttactgaggatcacatgcctcttccccattgtaggttcatggagctcatgaggaccctcatgtatgttccaagaggtaaggtgacagtagagtgtcttcactagagcctttggcttctgttccagtgtacacacaccaccaccaccacccagtgaaagagaatattctaaagagacacttgtgctccctcttttgctatttagacattaacctcatgccaggaccctaagtatggactttgcaagggggcggtcactggatctgttcatccctctttccaatggccacattgaagaaatctttttcacaattaacttggctcttttaattggcttattgagaatggatgtctgagcctggctcattagggctgctaggggcatactctcttaaataacaagagagacccttaagagtctgtgatttgtctctgtctccaatcaagggccctttcccactatttgctgtgcagggaaagctctcctctcacaacctggaggtaccacttctacatgaagcaggggatgcagtaaacactccagtatgggggtgggtagaggtgctgctgtgataaacttagaagagtctgtatcccccctgcctttgtgtgaattagcctatcatgtcagattgtgaggttgatctcccagcaatgggatgatatgtggtcactacctatatcagggttaaaaaacagaggacaagtgagctccctagtccaatttgggttctggcacactctttttgcaaaaagaaattgccttgctgagattgcacaataccaagattacccttctccaacagtgccatatgccatcctagcaaataggcaagaataaacttggtaatgttctttcttttgcctttatccatttttcttgaaggtttctgggaaggagcctcagctcatcctttaggtctgaggtcctgcctgccatcctcaccctaaacagactgtattgccatcctggataggagagcagggaggggtgaggatacccagttctcaatagcaggctagtgagaggtcttgaagatccactcaaaatccagatcatttgaggtcagaaggtccaccctaaatctggccacacctggtggcagccaacagaaaaggacatggacaaaggaaatttgtttttttccctgcctgtcttcactttcgctggcaagttcacaagccatttctttgctgggcttagaacccacttctttgggattctaacctagactgaaaactgggactccagcatgagattggggctgctgtggtacccagtctcatggacttagcaactactggatccttggcctttttgtctagagacagcattgttggactacttgtactgcagcttgtaagcaacatatatatttataattagttctgttcctttatagaaccctgactaatatacatgggagtggaggaaataagtctttccttcatagatctggatagcagggaggaaatgacaagggggacaggtaaaactgttggaggatttaattgcaaggttggggtagggaaatcatagctgctacttctgccttcctttggtgagaaggctgcctgtgggtgggatgatgaccatggagtatggagttggttaggggacatctctagtgccacaatattgttaggcagtatgtggtctcttccagctggtgaggaggaatgtcaagtggcactgaagctggtgtggccatgggcaggtcttctcacatgggtgtccttgaccatttcatttgaattttgaggagcttgcccatagacactagggagtgtggtttggtctttatccctctgaggctcaaggttcctccccattgttcctaactcctgtcttgaggagtctagggacagactgataggctgttcttcttccctttgcaggggctggagtgaggggaggaggtgatttgcttcttgtggagagatgggtggctcagatagggtcaatggtggccctgaaagcattacagtgagttttgagaacttggagaatttgatagttgaggaatgtagctggggtcagtggtggtggtaacagcagcagcagcagtgatggtggtggtggcagtggtagcagcagcagcagcagcatagggtatagagtggtggcacgagcccagggactggaatgtgtggctaaagcctatggtcccaaagtcgttccaatgtggggctaatagtccaaatatgaggttaggtggtaagaaggatagacacagaaagggtgtccaaaaggggcagagtgcagatggtataagttcccaaggctcagagcttgtgagggttcacccatttgtaggtgccctatctgcctctgtggggccgcggctgggaggcaaagggagacatgagtgacccttgtccctggtaattcccactgccctgcttcatttggcatggctcccttagctcccatccttcccttacctgccataaacataggggataggctggggcttctcttgatcaatcttgtgcagcagtggtgtgaagatacgccaggcttccctgagttcatcactgaagggatacagtatagaatggagtggaggcatatgtgtggggagggagaaagccacttctgttaggctgggggtccctcacctgcggacaaagtgcatctggctcccacagaagacatccaggatgaggcgttcataggcatcagggagcttcacattctgcagggttgggaaaggggtaatgttgctgataccactgtacttgcctacctaggtcctcccttagggccttgcccagatggtccccccgtgggaaccttgtatctgttgccataggtcaagtccagctctgactcctcagggttgaagaacatgccaggcttcttggtcatcatcttggtgtatacagcctcattgggctgcacacgaatcaccagctcattacgcttgcactgctgctggaagatgccccctgccacatctcggaactgtagtctcacctcagccttgcgttcattcagggctttgccacagcgcaggatgaagggtacccctaaggggcagggctggcctcaggaactgactttcctatagtcttgtgttgtgtgaatgtgtgtgtgtgaataagggagggaaggaaagaggaaaggagggagggagggatggaggaagggagattcctggtgcctgtgtacatgtgtgaatgtgtacatgaggaataaatatgactagggtggtgttccacttgtgccagccctccttccagcatcccttaacactcagcaccatgtgtctgaccatgctaataagtgtatatttgagggtacatctagcactacctttctgggtcctagaggtgtcacctaccatcccaccgctcattctccacatagaggacagctgctgcaaaggtggcagtggtggacccacggggcactgtggggtcatccaagtacccattggtagcttctccttctccattggggttccccacatactggccaaggaccacattgctggtttccacctctgagatacatttcaacactttgacctgggagaaaaccaatgtagaatgggtgggcccctcagtcacagggagggtgtagggaaatggacatgagcccagtgccttgtcatagagtggcctaccataggcacagctgctggggaactggcagaaatgcctctctacctaccttctcatcacggacatcatctgaatctgtggaggcaggtttttccatggccaccagacacaacatctgcaggaggtggttctgcataacatccctagtatcagaagaggcagatactgtggtcaagtgccacttccagggtgggaacaagggtatgaccaaattctaggggccctaggattactaaacaaggctttctagtgacaaactgggaaaccttgcttccttaaccctagtgtcttccaggtctcctaaggcaacaaagtagttgctgaccctgggaaccctttggggtttagctggatgggttgaataatagccctcagggtgtgaggatgaactaagttggggtgggatatgggttcttacctgatgatcccaaattcatcaaagtagcccccacgaccctcagtaccaaagggctctttaaatgtgaggatcacacaggcaatgttgtctcggttccagatggggccaaagatcctgttggcaaatctgtgggaggtataggaaagaggctagcgtgggagacattattatggaagggtctgtgaatggatctacccttgggattccacagtatagtggttgtaactgagccaagctagggcctagcaccctggccggtacctttgaggaatctgtctttggggtagtggggcaggtggggctcctcacattgccacccttgccctggtactcttccaccctgtcccctttgcacctcagcaccatgaggttctggaccatctccttgcccaggtagtggtcaatgcggtagatctggtcctcacggaacagagaggagatgtggttcgacagctggttggagctctgcaggtctctcccgaagggcttctccactatgatgcggttccagcctctgctaggagcccccagtcatgttatttcccaaatcttcccccaggaataggcccagggccatgtcaccctgaccctcaccccaggaagcagagctttcatccactctatattctcaggtgacccagggagctctactgactgatatttatccttaccctgcacaggcagcatcttagaagccttcctgctaacatgctgaggactggatcagtttctgggatttgcccaccttggtgctaagggtagcatgactggcacattcttgggtgggcatttgtttccctttttcccatgccagatcctcagtgggtcagaagtagcccagcatccaacagagaagtagacagataggatatcaaggacacagcttcctattagttttactttatttagtttgaaataaggtctcatgtagccaaggttggcctagaacttgctatgtagtcaaggatgaccttaaactcctgattctcctgtctctacttcttaagagctgggatcacaggcatgtgccatcgtgtctggcctccctcattggtttttatattcttacttatttaatgtatatgagtgctttgtcttcatgtacattggcacaccagaagagggcatcacatctcattatagatgttgtgaaccaccatgtggttgctgggaattgaactcaggacctttgaaagagcaatcagtattcttaaccattgagccatctctgtagcccctggttttatattcttgagataaagtcttgctatgttactcaggttggcttggaactcaagggctcaaagagtagtcctgcatcatctcttgggactagggactattagctgggactacagttatggcccaatgcaactgacttctattggttttatttgttttttaaactagctttttctgagacaggttctttttttggtttttcaagacagggtttctctgtatagccttggctatcctggaagtccctctgtagaccacactggtcttgaactcacagagatcttcctgcctccagagtactgggattaaaggtgtgagctaccaccaccggtgagacatgttcatactatgaagactaggctaactttaaattcactatgtagccatgccaaccttgactacatagtgatcctcctgccccttgcctcctgggattacatgtgtgtgccactataccctgcttagttttttttgttgttgttgtttgatttcactctgtatttcaggttacccttgaactccaactactcctcttgcctcagtctccacagtgctgggattatatgtgtgagtcaccttgcccagatttccattgattttaaaagagcaggttcctttctttgctgttcacaacagagcactaaagttgttttctaaattcaaaaaacgaaagaaagatggcgttcagtctgcagtggtctcttataaaacaacactgcctcctggtgggcctgctggggatctgaaagagacagagagagagagagagagagagagagagagagagagagcgcctgcgagcctcacaatgaacagtgttctatggagcaacactgtcatcttgtggtcagtggaaactgttccaaggggccactattttgtagtaagagccttggaggctagaagctgctgagtaagtatatgtggtaataacaaaggctgttagaaaactctagtacttatagcctgttcccttttttgaaatgctaatccatctggacaacaaacattcagcttttcagcttgcctagactggcttgacctgggtttagagtagcagaagcaagagcaaacagacaggaagggagagagaacgataggccttacgtctgactcatgcaggtctcttgaatgttcttggtgacagcttcatagactgtggggggcaaggccaggtagaataggcggttggcctgcatcccctgatgcagggcattcatgtggctgttgaggtgcttgtaggaggctggatcatcatactggccagccacataggagttacgggcaaagaactcctccagcttgggtctttcctctggggtggcctgggagagatagacagacaggtaaacgccagcttctacttctctcagagtctatacttgttcttccctaaggagtgaaggatctcatttttgtataatgtcttgctccacagctaaattgggtttctcttgaatcaactgtcctggctccacaagtacaagagtttccttcatcttggtaactttgtgtacccatggggatggggctgagacatacagcaggaatactgtatgcaggtggggcaaagtactggtatagtttgcatatctttagggccctcatgcctagaacagaattctgatttcaggaaactgacttgagagaaaagaacgttggagaaggatgtctctctaaaattatcacagcaaactataggtgctgagaaaatgccaatatatagcacatttgccagggggaagaggtacttggaggtacttccagctgctggcatgacttagtgtggcaccagggcacagcaggatggagccagagaggctgggtcagagtggagctgggaaacagatctgaggctgaattgaccatattcttctgtctttgttcagaagtcacagaaaaggtggcataagtaagaggacacagctcttaagtggttggtaagggagaacaaggatgtgaggtgtcagagcttgagtgttctgggtagccctgcctttttgccagtcaagtgaaaagtggggaaggaagtgttgcttatgatggggggggcggcatttcctcatgggctgcctggagttagtcttgctgtggggtaggggaaagggcaaaacaaggctctgggatactccaatgtcactcactttaaagaagggctcactctgcttgcggatgtcatccactgtgagtcgggagcgggcatagcccacaatgaaggtgtcttcgggtagaaggccatcccggaacagccacctaaggttacaataagactgttttcaaactgggtagggaaggtcaaagcctatccctggtaaagagttttttgggggacaggatagtgtagacatatacctaccagatagtgggatagatcttcttcttggccaggtcaccctgcagcagaggaaacgtggtcagaaagagctgtcatgacctagatcattccccaccactggtaaaatgcgtcctcatttagggttaccactcagctacagatatatctattatgctcccatatatcatcagagaagctcagaaattcaagcctgccccagccttgtaccaatacaggtaagtagatgagtctgctgggtgcaagatgaaaacctagacattgagttcattagaacttaagaatgataaaggcagcacatacaacaaaaacaaattctgtgagatatgacagatgtcacattagcataaaagggctacaaagtaatgagatggtcattcaattaatgaacttagaaaaaatggcagcaggccaggcttgatgcagagtgtggtcttcgctcagtaacaaaggccagatttggtggcatgcaaccttataaccttccaacatatagggagacactattccaaaagcccctcctccagaattttaaaacagcaaaaaaaatttataaggaagcaatgaaaaaatacaatgaaaaaattggggttggggataatgctcagtgactttggagaagtcagattctcctttccatccctgcagtaaaaaaaacaaaacaaatggaaacaaaatagaaaattaacaaaagagagctggaggatggggaggagaggtgtgaattgtcttctggatatgacatggctgtggcacacatgaagaaatcacagcaactgtggttgcttgtagaagatatgcataagatcacgccagtcaacatggcagcatggagtgtgtgtgtgtctgtgtgcgtgtgcgtgtgcgtgtgcgtgtgtgtgtggggggcgttcacaagctcctatccctagctaaggatctattggcagcaaccataaggttgctggggagtataatttttcttcatgggtgtggctcctcgttgctcaatgagtggatgatgaagcactaactgaacttagtgggttataaaaaagaaaagttgggagggtgaggtggaagggggctcaggagttagagggacaatggaggggtgatatgctttaagtattttgtatacatgtatgaaaatctcaaagactaaattaagaactcaaaaaatcaaaccaatataagaacaacttccccaaataccaaaccaaacaacaaacccaaacaaaccaaaaagaaaagctggcgttggtggcacaggtctataattccggtacttaagtggttggagcaggaggatcaggatttcaaagccagccagaccctgcctcaaaaactaacaaaacaaaacaacaaaactaataaaaatcccaactaaaccaccaccacaaaacccaacaaaaacctagcaactgctgggcagtggtggggcacacctttaatcccagaactctgtatagtcctggctgtcctggaactaattctgtagaccaggctggccttggactcagagatctgcttgcctctgtctcccaatgctgggattaaagacgtgtgccaccttgtcctgcccatgttagtcttaaattcagcatgtagtccttgctggcttcaaactccaaacaatcgtcttgttcagcctttgtgctgggattacaaacatgtgccaccatgttcagcatgaaggacaaatgtctggaaaaaatccaacctacaatataaaggagcaaaagacctaagaggtggcaatgactagagacaacccctggcctggagagcactgccagtggcttctatcataatcaaggaaatgaaaatttgagtctgaagcaaatttcccctgaagacagaagaaagggggagtattcctacagccactctgagaccttagttctacaacttgatgacaaaggcagatgcaaaagcctttctatttactggctggttggtttttgagacagaaatctacctgcctctacctcctgggactaaagacatgcaccaccatgcttgcctaaaatgagtagctgggattagaggtctgcaaaattaggccttctgagaaagctttacatatttctgtgtattgatttttaaaatacagcaactctgttaagttcagcaaatgtaaaaaattctatttgagattttttaatcaaagacagaagggaatctctttaatttgatttgggacatctatcaaacatcctaagaacaccatacaccatgtggtattggctacttttcttgttgcagtgacaaaattcctgacagaaagtaacttaagggataaagggttcattcaggctcatagtttgggggtacagtctgtcatgtcagggaaagcatagtgataggggtgtgaagtactttgtgttcacagtcaagaagcagaaagatgaatatggacactcaactcactttctcttgttttccttttgttcagccagggacagcaaccattagggtgtactatgaacattcccggtaggcctctcttcctcagttaaatctttctggaaacatgatcatagacacacgtctgggtgtctatgaggagatttcttaatgcctgctattgcttcttttttgttgctattgcttctttagtcagtcttaaactagaagtccttgccagtatcataagacaagaaaatgaaaatgttgtaaggtttggaaaaaagacaaaaacttattattagatgatagcttgtttattgagtgcaaacttgtatgaccactttggaaataggtatggaggtttcttaggaaaatgggaatcagtctacctcaagatccagcaattcctgtcttgggtatatacccaaataatgcacactcatacaacaaggacatatgttcaaccatgttcatagcagcattgtttgtaatagccagaacctggaagcaacctagatgcccctcaactgaagaatggattgagaaaatgtggcacatttatacaatggagtactactcagcagaaaaaagcaatggaatcctgaaatttccaggcagatggatggaactagaagaaaccatcctgagtgaggtaacccagtcacaaagacaaacatggtatgtactcactcatatgtgaattttaggcatagagcaaaggattaccagcctacaatcctcttcaccaaaggaactaggaaacaaggaggactcttaagaaaagaatgcatggaccccagagaaggggaagggaacaggatctcctgagctaactgggagcatgggggtaggggagagggagctgggagaaaaagagggggagaagaggaggggagaggaggaagtggggtaacaggaaagttgagttaggggaagaatagaggagagcaggatgagagataccataatctaagaaaagaatgcatggaccccagagaaggggaagggaacaggatctcctgagctaactgggagcatgggggtaggggagagggagctgggagaaaaagagggggagaagaggaggggagaggaggaagtggggtaacaggaaagttgagttaggggaagaatagaggagagcaggatgagagataccataatagagggagctattataggttcaaggagagatctgacactagggagatttccagagatctaaaaggatgacatcaattggcaatctaaatggagaggctaccttaaatgccctttccctataatgagactgatgattgtcttaaatgccatcttagagccttcatccagtagctaatggaagcacaagcagacacccacagctatacactgaattgaactctggaacccagttgcagagagggttgagtgattaggaaaggggtcaagaccgggctggtgaaacccacagaaatatctgacctgaacaagggggagtgtatggaccccagactgatgtctgggaggccagcataggactgatccagagccctgaacaaggatgtcaatgaggaggcctcagtactctatggggcctttggtagtggatcagtatttatccctggagtaagaaaggactttgggagcgcatcccatatggagggatgctctctcagcctggacacatcggggagggcctaggccctacccaggatgatatgacagactttgggggatcccccatggaggaccttaccttccctgagaagcagaagggggatggggtgggggattggtgggggtgtaggaggaggggagggagagggcagggattgacgtgtatcaggcttgtttctaatttgaactaataaaaataatttcttgaaaaaatatctcaaatcaatctacaaagtaatcattagagttaatgagaatttagccaagttgctagattaaaaaaagcaataggagtaggtagagatttcttaggatataaagtaataatcataagctagcactgtactgcagcctgtaatcatagcactccagaagtggaggtaagaggacttcagggttatccttgaataaggacttcagggttatctttggatacatagtgagttcaaggcctgcacagagagagaggtgataggagaggagaatgatatgaaaatatgaagggcatatgtgaaactctaggttcaatttccagtattatgaaacaaagaaaagaagaaaggaaataggcaggcaagcctggaattgtggccatgtgctttgcatgtgcatggcccagattataatccctaacatcaaaaagacaagctgcagccttagagataccattcactaaacttatctatattcagaatatctaaatagctcctatgacaaaaaatgtaaaacaatttaactgacatgggtaaaaggcttggtcagatgtttcactagaaagaaaatgaatggccattcaataatacatggaaagtgttcaagatcatcaggtgtcaaaaaatacaaattgagcaagacaccacttcatacttattagaatgattgtaatctaatgattaacagttggacatgttggtacatacttataattcaaccacttgggaggcaggaggaacttcatgattcaaagactagcctgggcaacatagtgagttctaggctaacctgagctacatggtaccttatgtcaaatagaactccctccttccccccaaaaaaactggtgtggacctcacagactgtggatagaaacgtgcaatagttactaaatctaaaacagcctggcagcctcttatcaagtgaagtacctactcctatcttatgacccacaattcctccactaggtgttctcccagagaaaaaagcaggcagccaaccatccaaagatctgttcgtgaatgattgtggcagttttaatttaaaatatcttggacccaggtggtggtagtgcacacctttagtcccagcaatcgggagaaagaggcagagggatctccatgagttcgaggccagcctggtctacagatcaagttccagaacagccagtgttacagagaaaccctatctcaaaatgaaacaaaaacaaaaaacaaaagcctggagatgctcaaataaatcagcacacagatagacaaactgtatatttgtattcagctactcaggaatgagctaccattctaccattccaaaaaatgttggcaaatctcagatacattatgctaaaccacagaacctagacacaagagactgaatactcatgggttcacttaaaagtccaagaatgggcaacatgagtctattatgacagaactcaggtgagtgtttgcctggggaggtagtaaactggctagcaggggtacctaagaattgtgtggatacctaagaaatgtcctaaattaggccatcaacagtacagctactatgttttaaaaaagattttatttatttattaagtatacagtcttctgcctgcataccagcagagggtaccatatctcattcaaggtggttgtgagccaccatgtggttgctgggaattgaactcaggacctctggaaggacagtcagtgctcttaaccactgagccatctctccggccccactactatttatgcactacaatgtgtacaaagaaaagagcgtaaaagcagagggatgctttttgagtgtaggtttttgctgtaattttttaagactgggttttatgtgtcctaggctagcctcaaactcattatgtagccaaggttggccctgaactcctaaccctcctgcctccacctctctggaattacaggagtgtaccaccatatgttttacattgttttaagcaagagccttgttgtgttgatagtcttgaacgtcttccctgaatctcctgcttcagcttcataaggggtaggacttcagatgataatgctctgtttcttctttttatttaaatatttattttattttaattatgtatatgtgtggtggtatatgcacactggtataggcacctatagaagcaaaagaggccactgggttccctggattgtgagttacagggagttgttagctgcctgatgtgggtgctaggaaccaaacttgggtttgagcaaaagtaacaagtacttttttttaatctttccagcctttctttctttctttctttctttctttctttctttctttctttctttctttctttctttctttctttctttctttctttcttctcccctctctcctttctttttttggtttttcaagacagggtttctctgtatagctttggagctttcctagaacttgctctgtagaccaggctggcttgaactcacagaggtccacctgcctttgcctcctgattaaaggtgtgtggcaccatcgcctggctccagcctgtttcttaaagtgggagaaatttacaagggtgtgccaagtttgtgaaaagttgtccagccacacccttaaggtctgtgttctttttttaaagtagaagtcatctttttttttaaaaaaagatttatttatttattgtgtatacagtgttctgtctgcatatatgtctacaggctagaagagggcaacagatctcattacaggtggttgtgagccaccatgtgattactgggaattcaactcaggacctctggaagagcagccagtgctgttaacctctgagccatctctccagcccctgtgtccttttatatatatatattccaataataattataaacatctggggcttagtggtaaagtgcttagcaagcatgaggcagtgggtttgatctctatcattgcaaaactaacaaaccaaacagcaccccacaaaacactataaatattaatagatacagattaactgcttttatttactaacaccaagtagttggcaaaataagcaatttaaaataagaaatttaaaacaataccatttacaaaagttagtattataaagaacctagaaataagttcaatagaatactattgtgtgggcttacagagaaaatgatccaactccattaaaaatgacctatctaacaccctccatgctccactctaagccaatgtacacacccagttcaatctccagtaaccatcaacagcccagcatgctttcagttcgtaccttgtcaaacaaagtataagaaggaggggctgaaatggctaccaagctcttgaacaatagagtaggtatctgccctttcatctcaaactctataattaggaatatgggatgggtgcaaactcacactacacagggtactgctactacatggggagaggtgagcatctctgagtattaaggacctgaatatttatgcaaaagcaatttgttgaaacttttacaggcatatctaattaaaaattcaaaacaccactccatctaacaaggtatttcggcactaatttcccagatgtttggaatgagttttcagatggagttggtctaggtggcatgaactttgccaagtttaaacaagctatgcagaatgcagccagaacaatactctttacctgggcccactgtgacctgcgaagatgctgggctccatggatcaggtacctccagaaatcgaagtgaactgctttttcctttagcacaataaccaataggtaacttcctgccatcacaagtggactaatacacaacatagcccatgctgactagctctttaaaatgaagaggtggagctggagtggtggcttggtggttaaaagcactggatattctttcacaagaccctggtttgatttccagtacccatatggttactcacaaccatctgtaagtctagtttcagggggatctgataccctcttctgacttctaagggcaccagcactgcaacttgtacagacatacatgcaggcaaaatacccatatacataaaatagataaaacataatcaaaacaatgaagagtcagctgggcgttggtggtgcacgtctttaatcccagcactcgggaggcagaggcaggtggatctctgtgagttcgagaccagcctggtctacaagagctagttccaggacagcctccaaaagccacagagaaaccctgtctcgaaaaaccaaaaaaaaaaaaaataattgaagagtcaatacaaccttagatacaaacttcaaaatgactgagacagatatagtagtatatacctctaatcccagtagttgggaggctgagacaggagattaacaagttcaaggccagcctgagaaatgtagtaagcccctgtgtaaaaaaataggggcaaagggtggtggggggaaggctcaggctcaggctcagtggtagatttgcttagcatgcaggaagccttgaggtggtatgtcctcagtaacatattaacaaacaaaagagattgagctatgtggctgcattgatgaatacatttctataggaaatggcagttcttgataaggatgtctatggacaatcagaatttccagcggcttaaatatttgtcttcagaagttttctgagtgacaggtccatggaagcaagtgtgtgtaggtcatttctaggttctactgggttcccaaaacttctacaggggcctgttaccaaactttggtaacctgtgttggcctgagggagcaattccctccactcagtgcccatgtctgtcaattgttcaggattaaagttttgagcactgtggagtgggtccactcgataactgccatcttccatatgaacttctggaagcctgagcccaatggccaccttgtagccccatgctatgacgagtatctttaggaaaatgtctaagacttgccagctgggctcctattgttctgtcactccctcatatgatacctagtatggccatctgagtggcctacttgctgtcccctaagccactttgcttggcacagcttttaccctgttgtgccagatggctgtccttataggtcccacaaaggtcagcttagacaagccccattctgggccagcatctcccctgaggatggctcttggttcctcagagtaacctcatggtctgtctctggcatctctcatcagtgggatgtgggttacagctcatgttgtcctggtctctcacacaccagaaacggctggcttgctgggaactagacactgaaagaaacaatgagaacactggcctgcaaacttctctaagcaggcagtgtttgcttatgatcaaattccaacagactgggaggaatcaggacaaactccagccaatgtattggtggcaagggacaggtttgctgagtcacagttgccccacacccagagctgtttgttcttgttccctttgggattaaccagacatagaacctgctctccttgttttagctcagtccctgcaaccgacagtctacctggcttcaagtcactcaagggaggtgaggtaggactaaggacagtggaggcgggaggcagccgttcttctcagggatgggggggggtgaccctgcctttcctgctggcttcatggctctccctgatctcctcttaggtaaggaacatgagaagaactaaaatctaaaatgtgtgggagtgggggcaattagagaggtagctgaaagtctctcatctttgccaccccctcacattgcccaaggatcatgacaggggaaggagctacctaaggacatgtggtgacttaggagaattagggcatgattaagatctccagccacaactataggtcagataagggcaaagagccctgagtaccaactggcctatggtcagctgaggtttgacctcttgttttataaaccgaaaccacagccaagggttgttgtggatgagggacctacctagcttcccaaagtagagttctgggctgtgactgaggatgagctgcctttcagctactggaatgagatgggggggtgtgttagggaggtttgggctaaaaaatctaacaaaaggcctccttcctacacgagtgactccacgagtcaccaggcttttgggagaatgccaaggtcatcatgacacagcaagaatcttaccagcccaagggagaagtcaattctgaaatgactcaagaagagggatggacttggagtgccaggtcactcctcatacaggcctgtcagcaggatggaccttgagtacccacagtctatggctatcacacaggctaggtgggaaaactgatgtatagagatgagccctgtagtgaacccatctgcccatgtggactcccagacctataccttttcttctgcataaggggaaaagcgtcactttctagcctcaccaaggtcttattgggtggggggaggtgtccttttaggttcacagatccttccccctaccagtccacaaggaaaaggttttctagagtggggcagtaaggatttctgtttccttccttgtttgggtgggagtcctgagaagaggagtggctacagtgaggcagcataagaatgcccctaggtaggaagctgggtacatgggtaagactgggcaaggacctggggaggaagaaggagtagagggcactacttggattcaacttgtcctggtgtgttccagtttcctaggcttggggcctggcagccactggattccttttagtttctagatcacactgagcttgttcccaatttagaggacaattgccctctaatcctcaaccagccttgctttctaggtccacttgggacctgtgtgctgcaggggtcttagtacacaagagaccatttgtgacttctgtcacatacagctgcctaaaatcctgttggtttgcttgctcccaaaagacactgtccccatgaggctagggactgaggctgttgtggattggaggagacacttgattgctacattgaatgaatggagaacttgcaggtatcctagatcagcactttgcctgcctcatgcattcagtaaagtgtcaggcaagagatattctgggggctgtcccggcacagggtctatttgtctcaggccctctgagaagaacagagaaaaaaaaatgatgatcttcagcaaacttctctttcttccccactcctttctgctggagctagcagttcacatttctattctggaagcctcagttctcactccagagcagaggagagcaaaggggaaccataccgattgcagtgaaatgaagttgctcaatttcaggctagaactcacataattagtctaggataaagccagaggctgtctggcccttgtttgttagatgaagactactaatgttcagagaaatggagacatttgttccaggtcacacaacaagctatcaatgaggtatctaagagttcaggtctgccagttgtaaactatctttgatgtttagattattattgttgcaagcttataaaagcatgggtggggcaggggaaatcatccttagttactttctcttccaggtggtcatttagactgaaggacctaatagtcagagtcctatatgctaaggtttgtagttgatacatgtatgcatggctcctttaaggggactaggctggtgctacggctgagggtaggactgctgtactgtgtgttccaactgggtacctctgttgggtcttacagttatagggagttaggggacagtgccttgggggtgtctctcccttgccctttcagtggctgagcccttctcctctgtttctgcattccttttctaagttttctcactccacttttgctctgaaatacaaggctgacaaagaacacgtctggcaaagggggtggcatgttctgatttcctcttttttgatagtaccgggaattgaacttagggcctcatgcataagagcctagtactttaccactgagctacagccctaacccttagtgggtggcaatgctctgtatgaacaaagaaccacagagttcacccagcactgaggggcccaaagtgtgcaaggtgctgagctagtagtggctaaccacccactaacacattagctctagtgaagttcttgctcaaggttacacaataagttaatagtgaagatggtaacacgagggtgatcagattctagggttaaaagcaagcaattgagtttaccttttccacaaaaccctggtcactgaacatgccctgcttccacaaagcacatgagagggtgccccacctgccccagtctcactgtgtaccatcatcacaccacccctctgactacgcttctgttcttcagtttttcctaacagagcatattggtagttgttttagttagacaactgggaaccaggtggaatcaacagaaatctgcagtaggctctggaagatgtggtaaagagtaggtgtttgcctccagggaacttcatgcaatagagagaaaagaggcagaggcaggacctcagatcctttcactgaaagcaactgtaacatttgtcaaattacagatttggaaaacatatagactgaatagcacttcctggttgcacctcagtttttttttttccatccaggaggaagaagttcaagtagatggtgctttagaacttgcatgctccaagtctggcccacatttaatggctgaacatagatttctgaaaagccttgcaaatgagaaatttgacagaagtacatgatgtacagcaggtactgactgctgtgatgatcaggacacacaggtgggaacatatgccgtgagttcaaattagaacctgtgtggccccttagcagtcagttgggaaagttcaggtaaagagagagaagtgccttgcaaaatgctacatttgatttttttacactcagggcctgaggggagactcaccgatgcacccatgatgataaatatatgtgtatcagcttggtggaaggcatcaccctggtacaactcttccctcaggatgccacacacctgggtccggctcagggccacctgctctgccatggtgttttctggtggaagaaagactcattgataaggcaggagaacagaagagcattgacaacttaaccttatcagaatcagaaactgctgcttctgggctccagccatatcctatgttgtcttctctgggggctgtacattacgaaatctctataagcattaatggaattcagctagggaatccactctgggaaagcgacgcggtcagagcatcgcactgtgtctggggccatcgcactccagtctctgccagaaacgccacaatgaactgagcatcttttcattgtgcagatgatggagttcagccccagctctctgctggccaagctaaatgatcccagaaagacccttctcttctaaaagtctagtcctcatgggcctaatgcggggaagtgcggggtacaatgggatgggttaagacctcgtagatctttttccatatccaagcataacaaatagcgctcatcaaagggacacgcggctcataagcgggaagcacatccctccaccggtgtgctatcagaccaccccctttacctgtgtttagttgctgctgccaaacaggtttacagttctggagtgcacagctcgtttccgggggctgcgcttagctggctcgtttaacgcaggagggcgggggctttgtgtgagctgccccacctcaggagcggtgagggaggggagagtagcagaagtaggtgcgcacgcatcccttgtcagccccaccctgttggccgtccctgctttccctgctccgcgatcgtgatgctttgctggcacagatacagctccgcacagttctcctgcgtccccatcgcgctaccccagccatactttatggtctgttttccgatggaccctcgagtccctgcgcactcctggatgaccccacttccgttagcagcatagccacgcctccccttgcaatcggtttggcgtcctttagcagcttcttctaggctttttccatggtagggacctggtggcagagagcccagtgacagaaccagactaaaactggggtgtttcattgcgaatgcgacgccttgaaaatggggtggggacaactgtgggcgaggtgacacacgcctttaattccaagcacccgggaagcagaggcaggtagatctggatagctaggagagagaccctgtatcaaaaaaaaaaaagtgtgtaagtgtgtgtgtgtgtgagtgtgtgtgtgatctttatcagtgaagagcgttgcgctcttcggttagccaatgcaggctggcggtctgaggcttctcttcagagtgggatgcagcactattgtggcttcgcagctccagttaatctcctcgacttcgagtctgtgttttacttccggatcccacacttacgacaccgnnnnnnnnnnnnnnnnnnnnnnnnnnnnnnnnnnnnnnnnnnnnnnnnnnnnnnnnnnnnnnnnnnnnnnnnnnnnnnnnnnnnnnnnnnnnnnnnnnnnnnnnnnnnnnnnnnacaggtgtagtcctcttctccaaagatagggctccatcggtggccattatgcagcttccgaggctcctgagcccccttccccccaccttgggcccagtttgttctgttgcatgctttagcatgctttttagagcatttattcaagaagtgcagattcgcgacccagcttacttggactgatttctgtccttccctctgcttatctgtcgcctaagggcttggccccaagtgctagaactcttagttcacagacatttttctgttgatgaaactttgttttctgaaacagcatctcgaaatgtaggccaggcagaccacgagcacaagattctcctgcctcagctttttcaagtgtaccgactttgcctttgtttttgaagggttcacgataaaagggagaaacagtcaaagttatctttgatgtaactggtcccagtggggtcaattgattgtaaaaggcaagggaagaaagcatggtgatctgtaaagagattattgcagtaatccatgtgaaggatgatagtgctgtcagccttttattactgaaaactttaaaaatgtacaaaagtagaaatattaacatagtaagttccatgtacacatttcttagttgtctctatcaactcatagctaactttaattcacagcccttacagtactctaccatgattttttttcctctttagaaaagatgttattttatgtgtgtgggtgttttggctgtgagtatgtatgtgtactacatgcttgcctgttgctaaaggaattcaggagaaggtgtgaggtccccttggattggagttgcagatgtttgtgagccaccatgtgggtgctgggaactgtctctgcaacaacagcaagtgctcttaaccactgagtaatcatcttttttgctccacccattataattttcaaaaacagctttcttgagacataatttgcatgctgcaccattcacatttaaaaactaaaaatatttactatttgtgtgtgtgtatgcatgatgtgtgtggagtgtcatggccagaatgtgttctcaggtttccaggcttgcataccaatagttatccactgagatgtgtcacttgcccataattcaaaatttttggagagagtctcatgaagatcccttctttttgagtttctcatcctcctgcttttacttcctaagtactaggatttacagaagtacaccaccacatctggctacaattcacgtatttaaggtgtataattcagtggtttttagtgggttcataggagtgtgaaaacatcactaattgcggaacattgtcatcatccctaaaagaaatcctaaataagaaactccaatccacctcatttctctaagtaaccactaaactactttctgtcaggatttacatgttttggatatttcttatgcttgtaagtatatacagtatatagcttttagtgacatttctttctcttagcaattatttggagcatgtgttcttgtttttgtaacagattttgcttattcatcagttggtggacatttggattgtttccactctggctgctttgaataatgctgctgtgatcatttatatatggacatgtgttttcatttctattgggtttatccataggtatctcttttgttatgcagtgaatttcagacatgtgagtgtttcattatgtatctctttcagaaagtactctcaataaacataactacaacaccatgatcacacttaaaatacctaatgttatagtgtgtcttcatgaattaaaaagatgggcaggggggaagataaaggaacagaaaaactaatcgaacaagcaagcaaaaactcagaaatgctcaagttttttgtcctgatagttgggggatggatttgttttcaactgatagtaagggaagttgtggatagaagtggatttgggagactcacttttttgggtactgctggggatccagagtctggtgaatgtttggcaagtactccattgctgagatatacttctagttctgggaaattaattttgacaagacctctttttattttaaaaatatttaattttagtttttatttgtgtgtgtgtgtgtgtgtgtgtgtgtgtgtgtgtnnnnnnnnnnnnnnnnnnnnnnnnnnnnnnnnnnnnnnnncacacctctgtgtgtgtgtgtgtgtgtctgtgtcagagaccagaagagtacattggatcccctggaactagagttatagatagttgtgagctgctcaacatgggtgctaggaaccaaatgctctggaggagcattgagtactcctaacagttgaaccatctttccagccccttgagtagacttcttcttcttttttttgagtagacttctaagtatccaagtagttttatatttgagtctgcaatttaggagtgagaactgtttgggttttatcaatattaagatttgggttaaagccatgggactggagagaattactgcaggggtgaatgtgttttggaaaaggccccaaggcatctcaacatgaaggaatgggaactcagtgaaaaggcctcagcacattcatcctttgagagagtgagggacactagaataggcttttctggaagctggaggaaaaagcaggtgaagaagagggaagggtcgccgggcattggtggcacacgcctttaatcctagcacttgggaggtagaggcaggtggatctctgagttcgaggccagcctggtctccagagtgagtgccaggacaggctccaaagatacacagagaaacactgtctcaaaacacaaaaccaaataaataaataaataaataaataaagaagaagcagcagagggaaaggtcagctgggtgagcttgggcagatggatctatgggtatcaacacttttagtgtaaatagccaagattcttcagtgttacaggcatcctaccttactgaaggtccacttctggaagcttgtattgagattgtcctcttcctggcagtcagttttaggcaggatttagaaagtcttcaggttagctctgcccagcatgttcttcatctggtttataaaccaacataagcagaccaggggtcatttgtctcagactgacactgcaagtcccactttcaaatttcttagcatatagaaaacaccagaggtctcttctatcctcccaaggaacactcctcaggtacaatgtggtctcctaaattctcttaccaagtgtttgaatttcctgtgattcctataagaaatgaccacaggcctggtggcttaaaacagcagaaatttaacatctcacagttctggaagccaggagaataaagccagagggtcagcaaggccacactccacctgcaaattgtacaagagcatccttcctgtgtctttcagctgctagtggctcagttgtttttagtttgtggttacatcagtctaatttcagcttctgtcttcccatggctgcctccctgtatttccacctgttttctctctcttgtctcttttgtgtgtatgtgaggaactgggaattgaacctagggccttgtgcatgctaggtaaatgctctaacactgaactacattcccagtcctgtttcatctgtctttcagaagggtactttttattgatgtcatggccaaaccatgtaacttaggatgatctcaatttgagaggcctaatatttgtgagacagattcttactatgtagaatgggctggccttgaactcataagagatttgcctgactctgcctcctaagtgctgggattaaagaccctgcttggcttgagatccttaatttaatcacatctgtaaagatccttttttccaagtaaagtcacatttattgggaaagaggacaagctatgaagccatggtgggtaaggagaaaagtgggctatagggatcagtgggagtaggtttgaactttcttgggacacagcaagcttttaggtgggaggggaatatagttttccttgggagagagagagttttttcctaagatggagtgtggcctgctcttggaagtgtgtggccaattccactgagaggaggtctttgagttgtaggattaggacatggatatatcaaccattctactacattaagtgaggagatagaattcccaaatatgctgccctttccttccacaaataactctctcattggaatgggaatatttgctatgtcttagatccaaactccacttttgtatctgattccactagataaaatgtacagccttttggtatgaatggaagtctagggcttctgtatagattgaatgcattgtgctggttgacagaactctgctctgtgtcatgcacttctactgtctttcttctagacactgccttgttggatgagtaagcacctctggaagaatcagttgagtgaaatggtgcagcccagtggtggcccagcaggggaccaggacatgcagggtgaagaatcttctctggggaagccggcaatgttacagctgccttcagagcagggtactcctgagaccctccagcgctgcctggaagagaaccaagagctcagaggtgaagttttcactgtgagggaggcatggagtaaaaagtcaggaggggcctggcacagtaaggacaaacttattttcacttgcaccttattattggtagggtatggatgaggttatggtgttcctaggaaacagccgtcatttcaaacttagctatcttcctgcttggtttcaggtgggattctctgtgaagattcacatatagggaaaaatgtggttcagggccagcaccagggaagggaaagggaaagggggaaagaggacaagctgagaagacatgtgggtagtggggaaagtggggtatagggattaatggtagtaggcttcatctttctcaggacacagcaaacttttaggtgtgagggaatatagttttccttgggagagagaactttatttcctaagatgtagtgtggcctgctcttggaagagggtggtcagctctggtgagaagagatctttgactgtgtcttctgtactggcaccctgtctccttcatgtcaccctcattttgtaaggtaagcattaactgtttttttgattttcgagacagggtttctctgtgtagctttggagcctatcctggcactcactctggagaccaggctaggctcaaactcacagagatccacctgcctctgcctcccaagtgctgggattaaaggcgtgtgccaccaacgcccggctgttcttgaatatgcaactgaagatgatgaaagttagagatatttttaacttgtcctttctgtgcttctaggctgtagccagaaactacacagtgaaatttaccttggggattgtctccctactttctcaagtctgcaggcatgtttagggccccctgatcctgaagacatagatgcaggcctggcagaactaaaactgagtgctccaggctagggataccctcaactgaccagaatataaatgtagcacataaagagaaagttgtatttgaggtatcccttcaagtgagaatgatgtgtttagtaatgcattgcagacacttgggggcatatcatcagtggaattggctggaaattggtttgactttgagaaaggctgcctagtatttcaggggtgccttgctgtcagcactcacatctactttgctgttttccctgtccccagatgccatccggcagagcaatcagatgctaagggaacgctgtgaggagctgctgcattttcaggtcagccagcgggaggagaaggagttcctcatgtgcaaattccaggaagccaggaagctggtggagagactgagcttggagaagcttgacctgcagaggcagagggaacaggtcttaaaggatttggagcacctgaagaaatgccaacaggtagctgttgggtaggcagcccttctgttccacctgtgtttgaagaccataatgacattcatgttctcataggaggcatgttgttggggggtcccccaagacctcttccagcttgattgctgggaatactttcagaaccaagagaagtcatcacactcactgttagtttattacagtgaaagggtccacattaaaaatcatcaaggtacaagacatgtagggcaggagccagttgagtccagatgtaagcttctcagggaacagtggttttgttgtgagcagtacgggcagtatacatagagcggtgtcacccaggaagcatgtctatgtcttgggagccagggtttatactggactcatttgtgaagtcacagagtgcttgggcacctgacccagcttgctcaggtcctagccaccctgaagtccagctggtaccataccatatattctaaggccctcacttacaccttggcatcagctcaaacagcctggtaggaccctaggcccctgataaaccaaggtactctcattaggcaggatttctcggggctcagagatgatctccaagtgcagttggagaaagtatttggtcccaggcctgtaagttggccttgtattgcactatctccaaaggatggtgtccttagtgtgggatgagaggatatttctgggcctttttggactggctggtttcaggaccctggggacagcagttgaacaggtgttgtacctcattggagggttaatctggggagaaagggtagggaggagctgccatagttaggtttcaacagtgtaaggctaagttcacaatgctgctggaagtgccctgtcaaaacatttggttcctatctgggaagacagctgcaaggtaccatatactgggggcttagacaacagagattgtccccagttttggaggtcagagatctgagatggaggtatgggcaggtggattcctcacaagggctattctgggtacttcttcgagtacattatcagtgttggcaatccttgggactccccagctctcttgtcacatagccttttccctctgtctcttctcttaaaattattacattttattttgtgtagtgtgtgtgtttgtgcatgtactcatgcatctgggaatgattatgccatggtgtgcgtatgtaggtcagaggacaacttgcaggagtcaattttctctttctaccatgtaagtcccagggattaaactcaggttgtcaggcttcatggcaggcatctttaccggctgagactccatgagctgtctcacaaccctcctctttttataaggatcctaatgtgaaacataaaggtggacagttgttaaagccatgaaaacagattttgttcaaaaactgataacaatgagagggaaagagctagctgagctctggtgatcagcacaggtgactggatagttatcattttttaagatttatttttatttatgtgtttggatgtttgtgtctgtgtctgtatatgtaacatgtgtgtaggtactcttggaggccagaagagatgtcaaatcccttcaaactggaattctttttttttaaataatttttttattttagaaaaaaaatcttattttacgtatcaattcccccattcccttgctctcccatccttccccactaaccctccccaacctactcctacctactccctaatgatagtgaggccttccatgggggaatcatcaaagtctgtcacatcatttgggggagggcctaggcccttcttggtgtatctgggctgcaatagtattcctccacagggaatgggcttccaaagtccatttgtgctctagggataaagactggctccattgttaaaggtcccatagactgttttgggctcctagctggcacccacattcagagggcttggttcagtccaatgctggttccccaactttatgactagggtctctgtgctctccctaggtcaggtcaaatgtttctataggtttctccagcacggtcttggctcctttgctcatccctcctccctctctacaactggattccaggagtatggctcagtgcttagctgtgggtgtctggttctggttccatcagctactggatgaaggctctaggatggcaaccaaggtagtcatcaatctcattataggggaagggcatcaaaggcagcctctccactactgcttagattcttagttggggtcatccctgtggatccctgaacatttccctagtgccagacctctctctaaacctatactggcccactctatcaaggtatcttgtttcttgccctcctctattcctcccctgtctcagtcttcctgatccctcttgttttcctcccccctcctctatccccttctctttttcctccctccatcccctctccctctgtgctcccaatttgctcaggggttcttgtccctttccccttctttgggagaatcatgtgttcttctcttagggtcctccatgtttcctagtttctctggtggtgtggattgtaggctggtagtcctttgctctatgtctaatatccatatatgaatgagtacataccatgtttgtctttctgtcattgggttaccttcactcatgatagtttcttccagttccatccatttgccttcgaagttcaagattttgttgtttttttctgctgagtaatattccattgtgtaaatataccacattttctctatccattcttcagttgaggggcatctaggttgcttccaggttctggctaatacaaatagtgctgctatgaacattgttgaacagatgtccttgttgtatgaatgtgcttcttttgggtatatgcccaagagtggaattgctggattttgtggtagactgattcccattttcttgagaaaccgccatactgatttccaaagtggtcttacaagttcacactcccaccagcaatggaggagtgttcctttttctccacatcctctccagcatagactgtcattggtggttttgattttagccattctggctggttcaaactggaattctaggtggctgtaagctactagatggttgttgtggtaggaactgaactctgatcttctaaagagctacaagtactcttagccatctctccactcaatgactgggaattttaaaatgacagtaggtactagagtgtggttcaataataagagtatatactttgcatgtgtaaggcctggagttcaatttttagtacttcaaaaaataaggacagaaatagagatagaaagaaaatggaggatttgggcaggggaagggagctgaagtgaatgacaaagggtattagtgtcgatgtgatgaggccagtgtgtttatgagcttgtacaaatcaaatgtatgtttttaccatactaggagactaggagtctgagtcctatcctttttgatgattgcatttcaaaggagtagcactcaggttttttgagacagcgttaggatcatagggaatacatggactttgagagggatacaggaaggagtcatggctggtagtacttactagctttccagcctatatcaagtgttggtcagaatagtctgttcctttaacaactctgagaatttgcaagtaggaaccaggaaggggtctgggacattccaggaatgtgatcttaagctgtttgaaggcatgttaatgtttggtcaaccttaaagtttggctgagctgagtatggtttaatacccccagcattccttccaccatgtaggttttgaagatcaaaattgggtcataggccttggtggcaagtacctttacccgacaattcttcttgctggttcagctctcagtatttataaaaattcagcatcttctctcattttttgaaacttttcacctgttgtatatatggactaggttgtttatttttcttgctgtctttgggtctggtctcccttttcagagtttcaaagagactgagaaaggtttactaccagctgaaagtcaaagttggtgactgggagaggacagatagccattgggctaatgaggctccaatgtacctaggtttataggtgctgaggggcaagagtagcccttagtacatcagctgcttgtaggctgcctcagcccttggggatgccaaaactgggcatcatgggagaaagtagtactgataggaaattcccttttctcttgcagcagatggctgaggacaaggcctctgtgaaagcccaggtgacatcattgttaggggaactccaggagagccagagtcgcttggaggctgccaccaaagaacgacaaactttagagggaaggtgagtggggaggggaagctactccaggaggccctttccagggttttgagtgaggctccaggagttcctctcccctaagagaggaaggactgacaagtcttttcttaaattccctggagccttcaggtctgccttgggagagccctggccagatatccaggaatctagttccacttttgtttccagtatctgaccctttacttgctgtcttagttagggtttctatttctgtgaagagacaccatgaccacggcaactcttataaggaaaacctttaattggggtttgcttacattcagaggttcagtccattatcatcatggcaggaagcatggcagcatacagaaagacatggtgctggagaaggagctgagatttctacatctggattggcaggcagcagggagagatagtgacactgggcctggcttgagcatctgaaacctcaaagcccacccccagtgacacacttccatcaacaaggccacacccactccgacaaaaatcttttcaaataatgctgctccttatgagcctatgggggctgttttcattcaaaccattacactcgggttcagtttattctttaggaagcattgcagggcccccttaaggccacactcacgatctcactatccagactgaagtttatcatggaaaggtatgcagtgggatccaccaaggcagatagtcctaggtaaagaagactggatacattacacagtcactcctatgaaaagcacagagcccccatgaactatttttcattggagactctgaaccccatgtttctattgggagtcagttacattggcatcctctgtgaggcatgcactaatgtttctgactctttgcagaaaagtgagtgtttggaagctacagtgtgacacaatcatgctgtaaatccctttgtctccatatattgttaattgtaagtgttcactacaaagagtcattggtctggtttgatgtttctggttcctattacactattgatactcggccctcactaggactcttcctggatatcctgctgttgccctgtgttgtggagattctgcagctttgggtctgcatgtcaggtccagcagatcataaataggatggatattagggttaggtcaattcataaccctggatctgggcctgggcagctgtagggttggtctgccaaccagtcctcccctgtcctcaccaccagggtgagctctccagcattgctcccggctaatttacctcttgcagcaatgagcgaggggtggcaccagttctcctgctttcacacccttagggttggttctcccacactggcaccattagggccagctctgttgtgttgctcagatgtgtgacaggcggttgctctcccaagtgctgcagctggtgaggggtaaggacagctctcctattcttatgaccgcaggaccagcttctccacatgtctcaggtgttgatgggtgggatgtgggactaccacagataagtaatgggggcagctctctttggctcatagcattggggctgggtcaccatcacctccaaccactgagcagttctgctgtgctgcctaggcaagaggcaggaactgaatcctgaatgctgcagctagtaagggggaggatcagctctcttgtctgttgcaggtggagatgggcgaggggtaaagggggaacatctcttaccacctacattgccacatgacaggcaagtagtggggacagctttcctatgcttacaactttggggctggctcacccacacctctgccaacaatgttggctctattgtgttacccaggtaaggtaaagggcctgctctcccaagtgttgcagctggttttggggaagagcagcttttctactattatgacctcagggccagttgcaggagatgcttcttattttccatcttctggctgccatggtccctttactgtcttaccagaatcagctcttagacataggctagttaggacctgaccccttccccaggctgtcttgctccagccccctcagtgtgttcttttttgttgcatgtcaggatgcgagcagttagtgagcaggttagacagctggagagtgagcgggaggtgctgcagcagcagcacagcgtgcaggtggaccagctgcgcatgcagaaccagagtgtggaggctgccctgcgaatggagcgccaggctgcttcagaggagaagtgagtggctgtaagggttggtaccaagagatcccagagcacccatggtgttttatgccttctggggagttctggtagggactccctgtgaataaaagagctgactttgccttgataatgacagagtcaactattatatgtaaacagaagtattttctatccacattcatagtttatttatatgtcctacacaggttcttttcaccacagttgacatatgctctaggtgtaaggaaagcaaggagccatggtggccctaaagactcacctgggcccacagtgcctgcacaggctctaaacatgctattggcatctggttcagcatccttttgagttttctttaatttagaacagtctccttgcctctttgttttgtgctgaatgcagtcagatgtcattttattgtaaacatctctcctatttattttctttttggtgctagcccaaggttctactcctgagttgtaccctagcccttgttagaaatatcccaagatgtaaggaaaacatgaactgtgtagcagccaaatcagtttcagtgtatccttgcagtcagcaaagcctgcctcagagttgatggccccaggagcctacatgtaatccaggaagcccacatttcaggtcttttatgggacaagaaggaagagggtgaagctgtaccaggcaagctgtggctgtactgggacaaagcagtttcttcagtgacagccccttttgcacaggcggaagctggctcagttgcaagcagcgtatcatcagctcttccaagactatgacagccacatcaagagcagcaaggtgagtgaagaacacaagctagtaagtatagctgccctgggctgtccagggaaaggcttttaccttcttccctccctcctcccctgtcccataaacctggaggggagtaatgtgagtaatgtgagtaatgtgaatgagatctggcacatctaacttttggaagggactctcaaattgcctgacaccgtcattgggctgtggctctgacagtttagagatggccacaaggagacgggatgcatccacaggacatctctagggtgtgtgtgtaggaccttcagatactctgcatggccattccttcgtgatcagacgttccaggagatgttccagaaacatttatttttctctaaaaacattttttgttttgtttttcgagacagggtttctctgtagctttggagcctatcctggaaaccaggctggtctcgaactcacagagatctgcttgcctctgcctcctgagtgctgggattaaaggcatgcgccaccaacacccggctaaaaacatttttatatttatttaatgtatagaaagaagtattttgcttgcacatatgtatgtgtactatgtgtatgcttggtataaataaatgtgagtgccaggttttggcaccaaaatgtaagcgagtgtattacagctctggagctgcaaaggtgtcctgatttatcaggaagccagactatgtagagcagcaattgcacgactgtggagggttagagcacaataggacaactctggaggggaagaaaaacaataggacagctcagccctggagagaaatgtgccctgacttgtcaggaaatcaggttacctagagctgcaataggatagctctggagggaggagccttaacaggatagctcagccctggagggaaagatgtcctgacattttgggaagccaggctacctgaggctgtggtgcagtaggtgatagtttctctgcagaaactatagcaatcctgctcctctcccagagagggccattacagttgagccctgctctgttcccctaagggaatatcctagcagagttaatggcttcttttaaggctacagtctgctaaagtggaagcccctgctgaaatgtagtaatctcctctgtctctaatagttgttacttttctgctactgacttgcgtaaccccttaaggaatgtcacacagcaagtttcttttgttcttctcagcctcaagtctccttaagggcatgccctagcaagttcttctgttctgtgctggcaaatgaagatcttcaccccagactcttttgagaaagatttatttgggaaggaggagtctaggagagtggctgcctctgcaaagttgggaaaggacagccaacaactgagcaagcagacgggcttacatagggcttcttgggagcagagttttcccagggagaggtttctgctcagggattgtttagttttcctgctcagggactggttagtttagtgggtaagaggcagagatggttctaatttcagggaaaacttgtgttgttttcactggcctttttaaagccttttggctccaattttagggcgtggggggggatctttcactgtggcactggttttaaagtcagggtgtttttctttggttctgggctcagggataaagtgtttctttcactggctctgagttcagagtcaaggtactcagggattggttggtttcatgcttcagttggtctagggccagaggtggctgtagtgtcagttgctcaaagtgtgcttctttagctggccgttttaccctatacttgatacctgtggaagattgaaaagagtgatggatcccttgcaactggagttgtggatgttgtgaatcatcgtatgggttctgggaactggacttgggttctctccaagagcaacaagtgctatttatttatttatttatttatttatctcatttttcgatacagggttagggtaacagtcctggctgtcctggaatttgctctgtagaccaggctggcctcaaactcactgggatcctcttggctctgcctcctgagtactgggattaaaggtgtgtccacctggctgcaacaagtgttctttttttttcttccaattttttgtttgtcttttcctccatttctttctctgtcttgtgagacagggtttctctgtggctttggaggctgtcctggaactagctcttgtagaccaggatggtctcgaactcacagagatctgcctccctctgcctccagagtgctgggattaaagcacaacaagtgatcttaactgctgagccatctttctagcctcttctttcctcccccagaaacatttctagtgtgatttggagctctttttgagtttatcctcatcaggcctaaactgggtgcagtttctagtgaccactttgtgtgtatacatatacataaatgtatgtggaagtcagatgacatcattggtgttattcttcaagagatacacatgttcagctctttttcttacattggttctcgggcttgaattcaggtccccacaagtactttattaactgaactatctccctagcctattctcttttagtttttaaaatttattcttttaaatttccttttatattccaaccacagttcttcctcccaccccttctcctgccacccttccccttcccccaactcacccccaggccactcttcctcatgggtaagggccctcatgaggaatcaacatagtctgacataataggggcagggcctggactctctcccatgcattaagactgagcatggaatcccaccacagggagtgacctccaacaagctagctcatgcaccaggtgtgtatcatggtcctactgccagggatcccttagatagtccaagcttcacaactgtctcccacacatggaggacctagttcagttgcctggagtctctacaactgtcagtctagagttcgtgagtttccacgagtttggttcagctctctctgtagatttctccatcacgatcttgacctcctttgtgcatatattcttctttttctttgactgaattcctggagctctcggactggttcttggttgtggatctctgcatctagttccattaattactggatgaaggctctatgatgacagttggggtattcaccaatatgattactggggtaggcctgtttggtcatccactattactagaagtcttagctggggtcatccttgtggattcttggtaattatcctagcattagatttctccctaagcccatagtggttctctctattaagatatctttcattgctcttccactgcatctctctcccgctcaacgatcctgataggggatgtccttctgtatatatgtttctcttattggttgatgaataaaacactgattgaccagtagccaggtaggaagcataggcagtgctatcagaccaggagaaggctggggagaggaaggcagagaaggcatgtccttctttaggctgggaaagttttcttctatgtttttgttgaatatattttctatgcctttgagttgaacttctccttcttctattcctattatttttagattaggtcttttcatggtgtcccagattttctgcatgttttgtgttaaggatctgttggatttaaaattttctttgactgatgaatctatttcctctatcatatcttcaatgactgaaattctctcttccatctcttgcattctgttggttatgcatgcatgtgtggtttctgattatttacccagattttccatttccagaattccttctatttgtgttttctttattgcctgtatttcagatttcaagtctgaattgtttccttcatttgttacattgcttcttggttttctttaagggatttgtcgatttcttccaattttttgtttgtcttttcctccatttctctctctgtcttgtgagacagggtttccctgtggctttggaggctgtcctggaactaggtcttgtagaccaggctggtctcgaactcacagagatccacttgcctctgcctccctggcatagccagtactgttaaccagtgagcgatctctccagccccttcctccatttctttaaggtaatttttcacttcctctttaagcatctcaaccatcctcataaaattatattttaggttgttttcttctgcttcatctttgttggatgttcaggtcttgctcttgtaacagtactagtttctagtggtgcagtattaccctttatattgttgaatgtgttcttaccttgttgtctatgcatctcttcctccaattggtatagttagagcttgtgcttcagggggtctctctatctccaattggtgtacttgggggctgtggctccattgatcactccttcaggtgcaagcagagcagagcctatggtgatcactcctcctggtggaagtggacccaaggcttaggtggtcactcctttaggtgcaggtggggctatagctccgttggatgctcttcctgttggaggcagggccaaggctccagttattgctcctctaggtataggtggggttgagggttcagtggtcgatgtggtagctgagaaatggcagtggatgctggctgggacacaggtgctctttcccagaggaacttcttgtgatagcttctggaagccactgcagatctccgctgctttcgtctcatctggtggttgctccccactcctgggccagaggctcaggacttcctctgatgctgctcccaggcctgaggcttgggcttccctctgatgctgcttctaagcaagtggatcaggcctccctctgacgatgctctcaggcctgaggcttggacctggacctccctagattgtttaattttgtttttgtttttgttttgtttttgagacagggtttctctgtagctttggagcctatcctggaactcgttctgtagaccaggctggcttcaaagtcacatagagccgcgtgtgtctctgcctccagagtgctgggatttaaggcgtgcaccaacaatgtctggtgattgtttagtttttaaatgacagggtcttgtataatccaggctggccttgaacttttaaagaggcagagactggccttgaactcctgatcctcttgatgccgtcttccatgcgctgagataacaggtgtgtgctacgatgaccagcattctagtggtcacagttttttttcctataatgaagtttattagctcttctcttttttcataaatagaatgggtaatgttgataattctttataacctagtactcataagaaaattgaacaagattgtcaaaatcccacatattgatgcctttaacactagcatttgggaggcagaggcaggcagatttctgtgtgtttaagtttggcctggtctacatggtaaggtccagaacagccagggctatacaaagagaccctgtctcaaaacaaaacaaccccctcaaacagccccccccaattgaataaacaacttcagagagcagtgggaagccaaatgatattaacagagtagagaaactgatttctgaaggcatttctgatgtatactaaaatttcttaaaattgtttaccataaagatctttgcagttctagtacagtgcagctatgcaagatgaagtgtctgaagaggtatttacaaaaataggagtgtgtttgttttctattaataaaatgaggagaactagtaggaaaggcaattgagcaaaatcaaaccccatgatatgtgtgtgtatgtatgtacaactgtgtaaaaaagaattcttatagttgcagagtgtagttaaacaaaattttatatttttatgtattttattataacaaaataggcagttattgtgggtaaaatagtcattgaaatttgacccctccctaagcataaatttaaaattttaggctatgaactggatgtttccactgccttaatgattacgatagctccatgaaaacatttttcatctgcagttatgactatgaatttttatttaccttctgtgtaaaaggtgagctcctctaggccttaaatatggccttagttcagaacctgtatgaacaaattttgaaagacactatggtgttgcacaagtagattaaaaatatttgaacactattatttctagcaaatacattaagggagggttcaaacagtaaaaacataaagacctctgtgcatataaaattcctcatgaaatgagttaactcattaattttaaaataaaaacctttattttcttatttgtctaaaatttaatagtaatagtaatagaagtcaatggagaaaagaacttaaaagctaacacaaaatcattcatagtgactcagagttagtggtcacatttgaagaattataaaaatggctgcttaaggaattgggagatggttcaatggttaagagcacttgttttttcagaggacccaagttcagttcccagcacccacattaggtggctaacagctacctgcaactccagctttgggggatcnnnnnnnnnnnnntacacacacacacacacacacacacacacacacacacacacacacaatacacacatacataaattaagaaaatctttaattttttttatttttctattcttctatttattttacatcctagctgcagcctcccctcattctcccctcccagcccccccaactcccatccccgccaatcccctcctcttctatctctatctaggaaagggcaggtctcccaaggagtttcaacaaagaatggcatatcaagttgcagttagactaagcacttccccatgtattaaggctaggcaaagtgacccagtatgaggagtagggccccaaaagtcagtaaaagagtcagagacagcctttgttgccactgctaggagtcccacaaaaggaccaagctacacaactgtaacatatattcagagtgcctaagtcaggctccctggttgttggttcagtttctgtgagcccctatgagccaaggctagttgattctgtgagccttcccatagtgtccttgacctttctggctcatttctcctcttctgcaggagtcccatatactctgcctaatgtttggctgtgggtctctgcatttggccctatcacttggtggatggtgcctctatgatgacaattgagctaggcaccaatctggtcacaggagaggccatttcaggctacttattggctattgctaggagtctaaactggagtattccccatagactcctgggaaattaccctgtgccaggcttctgcccgaccctgaaatgcacccccagcactctctccttccatgtccccttcaacctgatcactcatattcccatccccacctgtcctcagtccactcacaaaatctcttctatttccccttaccagggacatctgggtgtccctctatgaaatcttgttacttagtctctctgtgtctgtagattgtagcatagctatcctatattttatagctaatgtccacttatgagtgagtacataacatattgtctttctctctctgggttattacacaaaatagaaacagaaggaacattgccaaattcttttttttccttttttttttttggtttttcgagatagggtttctctgtggctttggaggctgtcctggaactagctcttgtagaccaggctggtctcgaactcacagagatccgcctgcctctgcctcctgactgctgggattaaaggcatgcgccactactgcacagtgccaaattctttctatgaggtcatagtcaccctgatactcaaaccacacaaagacccaacaacaaaagagaattacagaccaatctccctcatgaacattgttgcaaaaatactcaataaaatactgccaaactgaatccaaaaacgcatcaaaaaatcatccaccatgatcaagaaaatcttttaaaatggctgcttaatctctggaatgaattctgtgttgagaacatgggtgcatgtgtatagtgtgtgtgtgtgtgatacgcagacctttgaccaagtggcagagttgaaggactcatgggttgcagccttgtctgatgtgtggtgggctttcagtctgtggagggttagtgcatagtacttactgtggagtgggaagcctcaaagagagggtggctcctgtccttgaggagttagagtaagactccctagctgggaattctctgaaggagatgatgcaaaataagaggcagtgccttttatatcctcagagttcctatcagtcctaagatctttgtgcatcctaagaaagacctcaacatttatgtactgtggggccatagcaggatgaagccttctccctgcacacattgagattttgtcatttgacctgaatttcagacaggatttgctctagatttttttgctctagattttccttctcagaatagtggccagccagggaggtagtttggccccactgtgggccaagagactctgtgagcaccctttatctttctctagggaatgcagctggaagatttgaggcaacagctccagcaagctgaggaggccctggttgccaaacaggaattgattgataaactgaaagaagaagctgagcaacacaagattgtgatggagactgtgccagtcctaaaggcccaggtgagagctctgctccaacctgcctgccacatgagtgacccaccctcccaggcagtggggtctggtgcacctctttggcatcattctttggtggcctcttttagtcttcttgagtcctttgcattggtccttgacctcttggtgcccttgggatcacaggctttcatatctgttcctagtgtactatcatgtggctctgggggacatgacaagattctgttcctgtggggcatggcatagaatgcctgatgggcagctgatggatagttggcatacctttgttctatttgccaggcggatatctacaaggctgacttccaagctgagaggcatgcccgggaaaagctggtggagaagaaggagcttttgcaggaacagctggagcagctgcagcgcgagtacagcaagctgaaggttggctgccatgagtcagccaggtgggcctctaagagtgtagccaagaacacagccacacacagagcagtcatatactagcaacaaccagtagtaactgcaggagattgatgactcttggtgtttgcattaagttccctttacctcctgctgctctccccatgttctgtccttccaacagtgacctttaccactggtccaactagaaacttcacagaaatgcatgtattgataggtatctaaggctggagtttttgaggggatgttaggtttcctagtgtcttagtttggtttccattactgtaataaacatgatgactaaaataactaagggaggaaaggtcagattatagtttataatctgtcatggaaagaagtcagggctggaatctggaggcagaaactgaagcagcagccagaggggaatgatgcttactgccttgctcagcttgctttcttacacaacctagcccaccagtccaggggttgcaccacccactgtagctgggtatctcacatcaattattaatcaaaaaaagccccacaaacttacctacaagccaattgagattctttccagtttgtgttgataaaagccaaccagcacagttaaccccttgtcaacttgacatacaaatacaccaaaacctttcctttcttatttgttctccaattcatgttaagatgacaatataaaacataaatttaggctgggcagtggtgacacattcctttaatcccagtacttgggaggcagatggatttctgagtttcaggccattctggtctacagagtgagttccaggacagtcaaggatgttacacagagaaaccctgtctcaaaaaacaaaaaacaaacaaaccctcctcccataatattgaaagtcccacagtctttaaaacattccatcactcttaaaaaaatgtctctttaaatgtctaaagtccatcaatgggctcctataaaataataaggtacatatttttttactctaagagcgaagaaccatggcacagtcacaatcaaatcaaagcaaaaccaaaatccaacagtgtaaaaaaatgcagtgcttgatgtcgggtatccactaataatcctctgggctccaaagggcttaggcagctatacttctctggctttgccattcatagcacacatacatactttgtctcataagctcaggctggcttctctccacagctactgttattcttggtggttgtcccatggtactggcatctccactgcactgagggtgcaccttcacaaataacttctcctgacctctcaaatagtaccaaacctcagctgctttccataaccccttcatatagcccaatttgactgctagcatgagatgcaacattgacccactctgaaccagagcttctgtgtactgaccctgaggatatactcactggattctagagtctagaagatttcacctcagtgatgctggtctcttaatcactttcttggcttcaggtaaccagcatcaattgtgccagtaaagcaaaggttttacttcaatgctgctggtctcttgttcatcatacctgattcttcagctccagctgaccagaactacagattcttatttcaaaataccacatgaatgactgtgatagaatctttgctttgcttccctctgaaactttacaagccaggccttcatcattttcattgctgtcagcattcttatcttccttggctcccacagaacagcccattaagctctaactacttgatgatggcatttccagtccaaaattccaaagtccttccacagtctttcacaaaacaatatggccaggtctgtcttagcaaatccccaagagcctggtactaatgtctgtcttagttttgttactgttgtgataaacaccatgaccaaaaacaacttggggaggaaagggtttattcatcctacagttttactatgattagggaagtcagggcaggaactagagatgggaactaaagcagaaatcatggaggaactgctttttggcttgttctccatggcttgctcagcttgttttcttatatagcccaggtggttacctaagggatggcaccatccctagtgaactaggcactctcacatcaatgatcaatgaagaaaatgccccacaggcttgcctccaggtcaatctaatagggacgtttactcaattgaggttcccttttatcagatgactccagcttgtgtcaaactgacaaaaaaaaacccacaaacaaaaaaaactaaccagtacaaatagagttctcccaaattcatgtctacctaaaacctcataatctgacctcatttggaaatagtatctttgtatatatagctagttaacataaggtcctatcaggttaataaattgactgtggtctttatagaagcaccacattaagatacataaggcagacacaagaaggccaagacaaagagtctgggattcagctataagccaagaaattccaacgaatctgttaactattatcatctaggggagagtatggtacttctgcccagtcctctgatacgttgatttagggcacctggcctcctacatcgtgcacatttttgttatttttaagctaccaggtatgtggtagtttgtagtaaggttctgagaaaactgatgtagggggaacccaggagtaattgctagtaagtacaaagtttcctttggaagatgatgaaatattctaaaattatacaaatgattggatatgctgaatatagtaaaaaaacactgaatgatacaatttaaattggtgaattgtatggtacatgaattatatctcaatgaagatgtttattcataaaaattcctgcaggcattgattgaatggtttttgttttcaaaggattgaggatatgaggaagcgacatgtagagacttcccagccccctttactccctgctccaggtgagtgaacaggtggtagatgatgggtggagatggatagggagggcagaatattgtgctgagggaaagcatgcattagcctccctgctgctctgatttggggagctcttgttggccatccccagcagtagcctacagcaccctgaggcaaaaggaggaatgtgctggtagaggtggctcccagccacacatagtcaaatatggtggtatctgtaggtcttagtaccttgttagcctctccttcccttttgaggtctacccagtctgttcatgaagcctatccagctggcctctgttttttttttttctcagctcaccactcctttcatctggctttgcccaaccagcggagaagtcctcctgaggaaccacctgacttctgttgtcccaagtgccagtatcaggcacctgatatggacactctacagatacatgtcatggagtgcatagagtaggaacagcagatgtaaggccacttgtaataccatgtcctgaactatgcaacctgtgctttcctgtttcacctgcatagtccacaattaagggcttgttgtcaaagagctggccccaggacctagttggatccttgctttagcccttaggcctgctagttctgcactgggatagacagccccagtcagggctgtgttttccccttttcttctgtgtgcctgagtcagttgcctctgtagcttcttcctccctcctgtattctcctaggaagtctagaatggaggtcaggggctctcagggagcatcccttctccaagcagggctgggtgcagctcttcctccagctggtgccttattgccctgagctgcagcctgccctcccagggtatgtgccacttagggccataacatgtgttgcctctgatggacatttgggaagtattccatctttttgctaccgtaactaatggtgtagtgaaagtacttgtacactgatctatgtgtaccattaagacatatgcttagacataacattggagccttgccgtggaggaggttggtccacctttgtgtttctgccatctgctagacatgttgttctttactaaagagtgtgcttaagtgtctttttctggtgtatgtgggccctttttaattctgctgatgtaacttggatttgcatattttctacccacttttctgtctcatcattgccatttgttcctggggtgctctttgatcatgagtcagattagctcttgtctatcacagaaagtgcacaacttgttccactttgattgtgttaccgttttgggtcctggaagctgtttatgtactcatgtccattctttactcccatattttggctttggagttatgactgctttgtgatctgacataagggtatttcacatacatgcttttcttgttctagccccagtgtgctcttctctttggaaagcacattgttgtcttgtgtgaatgttggtttccatagttcatcacactcgagaagtttgtgatggcatgttctccactagcccagataattctgtcttgggaaccatttagtagtgactggcagattgtgaacaaggttctagccattttctgggaccttacagtcattggtattagccttgctattctagtaaagtaaaggaagttggagttgagaaagcaatagatgtgccttgctgactcctcaggcctgaaaccctttctgccctcctgcaagctttcatgtttctgagtgggatctgtaaatcaatccctgcctgggctttattcacagggcttcttgccgattaagagagagaaggttgagtagaattaggatttaaaaagtaagcctgagctgggggcttcctcagaatttcctgtttcctaattcccaggtatctatcagacagatctttggggaaatgttaaaggaatagacatgttctttgctcatgaacccttcatttaaatacctaatttaattttccttcaggactgctattgatttggtttgatttagttcagttttgtggtggccaatgactttcctatagctgtcctaaaaattcccagaggcttgaagcagcaaaagaatcactcttttatgtctggaagtcagatattaaatttcttctgagaatcaattccaggctttctctcagctcttggtagtttttggcagtccttggtgttgcttggcttatagacccatcactccaatctctggttctagggcctaatggtctcttcctctacaccaaattgtagatgtggggtctatctggtaattaagaagctcaagactcttgcctcactacaccttccatgacccttttcccaaataaagtcatgttctcaagttctgagggtttgggcttacacaacccagagtagggatatcatcagaacctgagtgcagcccaaaggcaggactctagggtgatggtgactgctaggcttcagaatttggaggaggtcccttccttctaggtgctatgctcctagcagggccagtgggtgtgactgagaaaggcaggttggctgtagcaggaaagagctgtttacttcttgaagtagctgtatgggcttcatgcttcttggataaatagagatacataggtacatttctgaccagtactttatcctgaaagtggtgcagaaagctggtgttgacccaggttgcacagcaggatcacctagaagccttgaaagcttgaaaacattctggcttgggctccatagactggtcaagccaaaatctgagggtggccccaggcagtggctgggatctagtacctttctcagaaggtgggagctcttgacacctccttaccctgaagtataatgggcaattaaccacacattaaataccaaggatctgggatcctaccatcttccctgacgtgggacatgcttctttcttttctggaattatttaattagacctggaaaaactagttgttggtccttaacccctcacacaagggaattagcctatttgcttttatgagctatggcccctagcagacagcttctggatccagacatccagaagcatattcttccccagaagtcctattactgttacttatgctctcttcctgttgacccatgaccaagagaaatccagagaaacagcaagacagtgcagagtacttcacccactgcagtaacaaaggataaggtgtagattgtaggtagagatgatgtcaaaataggaacagttgcagcactgtgtgtgataccctcaggcatggtgaggccttgaagtgtttcccttttcaagggaggctgtttggtgagatggaacaagcactttggaaacattctcagccctctttatatgacaacttcgtcctcacagtgactatttcattggagtggctctcatggccaccatcatttgtcactaccaaaggctgtgatgaaataggccatatatctgatgacataggcctgcatagccagcattttgaacattttgttgcatggaacattttctgtagtatggtataaaaaggccagaggattaaattatgcacaaaatatgaaataaagaagacctgtaagcatgcaccctgtcctcacttagtggatgtatgggcagaattgccagtaacagagtttttttggtgctatttctatgtctttaattctgatgcattatataggaagtagctgttgcatacaactttgaggtttcctctgtctatgactgatacaacagagtggtgcaaggggccaagtcaactaacatggggcctggatttcctgtgactgcagcaacaaagtaccactcgttgggggcttaggcaacagagatttcctgtccccctgttttggagggcagagatctgagataagtatgggcagagtgggttcctcataagagataacccattccagacccctttcccattgtgtagtaggtcccagcaattcttagtgctctctggttggacctgcatctcagattctgctacttttgtcacatggtcaccttgtgtttcctttttataagcacaccagtgtcaaacaaaggtggctatttggtaatacaaaaaacattttgttcagtatttagtgatggaaagagccaatctgcagagatagtcatagaacagcatgaggattttaggtatggagctgtggccaacatcatggagagaggaagaggcatctatctagtcactgctggggttttggcttcacaccctggtacctgggccatgtatctactactgggagaacaagggaaaaggacatcagagttgtgagagaagcagttcagcgttcaattctgatctagccaggttcagtgcaagatgtcttgggtaccttcatcttgccttgactgttaggggtggattcacattgagactgcaggcttttagttatccattgtttactgtcaaccagtgtgatcaggtaaatctgtttccactttgcttaatgtactccactgattttctgttgcttcaggtataaactctatcctcagccttatgttgctctaatttcatgtcatcttccctaaaagcccagccattctacactgaaccttttttcccctcaaacccattagcacttctgtgccttaaggcctttgcctctgttggttgtctcctttgctgagaaggctgtctcctaatcttcacagctgatttctttttgtcattcagatctaagtataaacaaaagttctttaattcgaagtctttatcctaaatcacattgccttgttttaatcacatcaaaaccttctctattctgctgtttctttcctcccactagagggagacagaagccttgtcaatccaatttagtaacttatacaggaagacctcagcacagggatactgtgtttactgatggctgagcttgtctgacatgacatcaggattcctctgccaatattttcacagacatcatctgtcaccataattggtgacttatagaagttattatattaatgtactaggaataatagtacaaaaatcttattttagaactatacatttttttggtgctgaggatggaacccagggtcttgcacatgctaagcatgcataccaccactgagctacaatcccactttatcagcttttctctgtatccccctacccctctctctgtagtcccattctgtagccctgcctagcttggaacttactatgtaatccaggatgcccttgaacttgcagccatcctattgcctcagtgtctctcttcagttctaggattaaaaatatgtttcacttgtgctcgcttcagctgcacatatacaaatatgttccactatgtctgacctttttcattttgttcagaatttgaatgggtatctgggcacaatgatacacacaattctgacccttgagaggaagaggtagggagagtaccatgaatttgagaccagcatggacacaaagcaagacttggtttcagatagggaaaaacatgatatgaaaggatggatcatgtgatcttcataatatatacttaaggaaacagattctgaagtcatagggacaagtttcagtctgaacattaatgaaatccctgagccttggcttcctcatctgtgaaactgtagattaattttagtttagacccaagtctagattttacattaggttttgagctggaatgaaagtcagttggacctgtctatgatagagcatgaacttgaagttgaagcaggatgctaatgagttccaggatatcttaggctacataataaggctctctctcatatcacaaacaaaaagtcaactggtgaatccctggggatgggtgggatgaggagagagtgatagcggacacaaggttctttggggggaatgggaatgttctgaaattggtcacagtgatgatcatacatctgtgaatatgttacagaccattaaattgtatactgcagatgagtgaaatgttgtatgtggattagaccacaataaaactggcatttaaaatgttatctaagctctgtacagtttcccagaaccttttgtgataatacggatgaagatacagaaagagttgaatatttgcatttgaagttgcttgacaagtgacctattgatgggctcttggtattgttccattaactagaaagacagagctggaggtaggacatatgtggttggctttgtctcatgaaatagactgatcacatcatgtcctttcttcagagtcccagggttggaactaactgaagattagcagctccttctcaaccagcttggcctggagggctgagcaacaggtgaacattaccgcatcatcagaggaacagaattaggtgggcaaatatggtagatactggccagtggggaagtggggaacactagggatagcagcttttaaaaaattccacttgtcccagttgttccaggatcagggctggggatggaatttgatttgtcagtatggcagagccatggtagacacatgtctatcagacctaaagataaggtcttatgccatattcaggggttgctggcagctggagtgaagggctttgtgtcaaccctagaaagcactgcaaaatagtcagtgcacagagaaagcctaaaattaaacaacaccagcaccagcaaatcccacaaaactaagctcacaatgaggtgagatgctcatgaactgaagtttctacaatgcagagttatgtctaaagaaaagatgcccagtcagatggttcagtgagtaaaggtgcttgctgccaagcctgacaacctgagtttaatcctcaggacacatggtgaaaggaggactatgatttccacatatgctgtcttaccccccattaataaatgtaacataaatctttttaaaaagttaaaagagaggctggagagatagctcagcagttaaaagcactgactgctctttcagaggacaaaggttcaattcccagcgcccacatggcagctaggctgtctgtaactccagctccagggatccgacaccctcacacaggcatacatgcaggcaaaacaccaatgcacataaaaataaaaaaagttgaaggagtgtgaggatgaggcttagtggtagggcacttgcctacacttggtttctgtcttgagtactgcaaaaaatgaagaaaaaattggaaatatttaaggaataactaaagaaagcgactataaacataaaataaaaaacttttgagtttgaaatattagcacaaacctgatttatttttatttttatttttgaaaaatagatatttttcctcatcttgaaatgtcctcaaagcaacaataacacaatagcagnnnnnnnnnnnnnnnnnnnnnnnnnnnnnnnnnntatatatatatatatatatatatatatatatatatatatatatatattcatatattcaaatatttatgatttattgtggcatcattaaaaattaaaataaaaacaaaacaaaaacaaagatacaaagattcccttgtaaatgttcttactgaaggaaatcagggcctcttggagaaatgacttatttcaggcatgatatgggaatctactcaaggtaaacttgagccatttttaaaaaatgacattatgtgtgcacatagacacaccatggcatgtgtgtggaggtcataagacaacttgtggagttggttctctcccatcatgtacatcctggggattgatctcaggtcattggggttggagacaaagtgcctttacccattgagctgtcttgtcagtccaaaccaaagacatttaaaaattattttgtgtgtgtatgtgtgtgtgtatatgttaggcttgcatggcaagcacctttacctgccatgtcatctcactggatgcaatctgagacaccttataaaagaaaacaagagaggctggacagattgctcagtgggtaagaacacttgctacataagcatgtaggcctgagtttgaatcctcatcacacatgggaaaatctctcagtatggcttgaactgaagcattgtcgggggctgagatgaagttggttggggcttgctgattgccaggctagctccaggtttagtaagaaacctgtctcaagggaataaggcagagatgatagcgcaggatacctggcgtctttctctgatccctgcttatgtgcagaacctccacacatgtgaaatacactaacagaacataaaacacacagaaaactatcaaagatcttggacatttgcaaggaagacagctgtcaccattggatatgaatatgggatcattaggaaaaataacaactctgtagacttttcctgccagtctctcctctacctctatcccttgtgcctgtgcttcccaaagcccttacatctgtgaacctcagggcagagaagggacattgagaaaagggttggactgatatgaagaatggttccttacagagtacaacagtgtcctgcctgagaaagattttaaggattggcagatctgtaagagaaaggcatactcaatgagtatgacagtgtcttaatggcctgatggaatctgaagattggctccacagtaaatgtattgtgggaaagggggctcaagtgtgggaaaggtaagaagacttgctctaaatatttatttgactgaaataagagttcaggatgggttacagtgtcacaatgggctgagttccatcaccactgactgtctagagcagtggttcacaggttgtgggttgagtcacctttgtgggggtgttgaatgaccctttcacaggggtcaaatatcagatattgtgcatatcaggtatctcactataattcatgactagcaaaattacagttaagtagcaacaaaaataattttatgcttgggggtcaccataatatgaggaactgtattaaggtgtcacagcattaggaaatttgagaaccactgctctagaggattgccactgtggtggccattgtagctgtaacataggcagagtcatagagattgtatcacaattgaagatacaaatgaggggctctgagctgtggaagatcaggttttgtaacattctaagagaatggttttactagagaattgacatgttccagggttaggacagagaaagcacaagatgagccaaaccatcttgactcagaaatatgcagatgctctcaaagaataactgagacacatttagcaacactagggaaaaaactcaaaatgactgccagcagaaaccaaagtaggcacataattgctaatattgttattgagccaaaatttccctcagtgttatcttgcagggaagaattcagctcagaaacagcttaagcaagaatttagtatgtttagtatgtttagaaaatgatagagcactactgagggtttagcagggtgagatcttggatttgtcattaaaatgcttgtgaattattttgaattatgtgtatgtgtgtgtgtcttgtatggggtatgcaaagggccatgggactgtacagcagtgacaactagtgtttaacaagttgacccacttggggagtcccacttgtcaaagccatggggctattgactggacgactggctgtttctgtgtgtagctttctcaggcaacactcctatacctccctaataagaacagctgtggagttctttccatagccccttgatggtgtactttatacttgttgggcacacatatagctgtggaaggtcaggaagatgatttctgcctatatttattacattactcagaatgacataggattctgtcacaaagacagcctttcacacagacagctaactttagacttcacagaagattcaaaggaggctggttgcccctgaagacaaatatcgggttgcccctagagtcaaaacacatgtgttttactgattcaaggccagaacttgaagcaactttagtctacatgtacaccctaccactcaaggtccagctaattaattgttaagttttgatttccaatgttgctttgtgtctgggaaccctcaccaacttagagctacaatgtgacattactaacctaagagaaactgcatgacttatattggtttttgagaatgggttgggccctgaaaatgtaacttatacttgtccagagtttggctgtgtgagaggcagagaacagaggcagcagacagcagcagtgatgcagagagagaaagatagcagcagcagcacggaagacagtgaggagagaacaagagaaatagagcattggaaggagatatagagctaagtacgaagctgtatagagaagcaagagagattcttttcagagacgatttttttcaagatgaagagattgttaccatcagaaggcatgtttccttatttttccccctttaaataggaaagtctagcccccactgcctatatggattttcttatttactctggtgccaccaaataagtaagcttcaggggtatgtgcacatgagtacaggttcctgcaactctagaggatcagattccttgggcccagagttctagagaattgtgtgcttgcctggaatgaatgctggaaaacaaactcgggttctctgaaagatcaaatgcacttaaccattgaaccatctctctagccccataggatttgttatttttgtttttattatttctaaatttctttgtttttttgagacagtgtttctctgtgtagccttggctgtactggaactcactctgtagaccaggctggcttgaactcagagagatccacctgcctctgcctcccaagtgctgggattgaaggcatgcaccaccaatgcttggcaattatttctttttaattaattatttaaattaaaaacttattttgcaaagcaatcccagttccatctcccccctacctcccattccccacaccaacgccctcatcccacccccatgcattcctcagggagggtgagacctcccatgagggatcatcaaagtctcacatcatttggggcaggacctagaccatcctccgtgtgtctaggctgagagagtatctctccatagggaatgggctcccaaagtccatttgcgcactagggataaatactggtttcactgccagaagccccatagagtgcccaggcctcctaaatgacacccacgttcaggggggcctgtttcagtcctatgctggtgccccagctgtcagactggagtctttgagctctaaaactggatttaaacaacagaaataacagaaagcctacaaactcatggaaacagaacaattctctactaaatgaccactgggtcaagcagaaataaagaaattaaagacttcctagaattcaatgaaaatgaatgcacaacatacccaaacttatgggacacaatgaaagcagtgctaataggaaagttcatagcactaagtgctttcattaaaaatggagatatttcatactagcaccttaacagtgttcctgaaagctcaaggacaaaaacacactaaagtggagcagatggaaggaaataatcaaactgaggtctgaaagcaacaaaataacaatacaaagaattaaagaatcaaagagttggttgtttgagaaaacaaacaagatagacagaccttactcaaatgaactaaaacacagggagagaatacctaaatttacaaaaccagaaacaaaagggggacataacaatgagaaaatccaataatcattaggccatactttaaaagactatactccagaagattaggaaatctaaaatggataatttcctcaatagataaccacttaccaaagttaaatcatgatcatataaacaacttaaatagatctaacctatttaaggaaatagaagtagtccttaaaagtcttctaacaacaacaaaaatcccagggccagatggttttagtgtgtaattctaccagattttcaaagaagagttaacaccaatactccccaaattaattatttccacaaaatataaacagaaggaacattgtcaaactcattttatgaggccacagtcaccctgatgcccaaaccacacaaagatacaacaaagaaagagaattaaaaaccaatttctcctgtgaaaatagatgcaaaaacactgaacaaaatactcttaaatcaatagtggaaagagtgcctgaactggaattcccctgtaaacagattgaggactacagtaattgttatcatagaaccttcatccagtagctgatggaagcagatgcagagatcaacaacttaccattggtccaagttcctggagttcagtcaaagagagggaagagcagtaatatgactaaaggggtcaagaccatgatggggaaacccacggaaatagctgacccgagctagtaggagctcactgactccagactgacagctggggaacctgcataggacctaactaggccctctgtatgaaggtgacagcagatggcttgagaagttgtggggccactggcacagaaccagaatctaaccctagtacatgaagtggctttttggattttaattaccttgctcagcttagacacaggggaggtcctcggtcctgtctcaacatggtgattggatagactttgttgactctccatgggatgccttactctctctgaggagtagatggggggataaggtggggggaatgtgggaggagtgtgagaagagaaggggggaactggtattggtatgtaataaaaataaaataataaaataaaaaatgtgtgcaaaaccaaaacgaagaacacatcaatgagctcttgaaccacgatcaagtaggcttcaatccagagatttagagttggtttcaacatatgaaaatcagccaatgtaatccaccatataaacaaactgaaagaaaaaaaggacacattatcttttcatttgatggtgaaaaaacctttgacaaggtccaacacccctttatgataaaagtattggtgggatcagggataaaaggatcatacctacgcataataaaggcaatatacagcaaacctatagccaacatcaacttaatatctcttcaatattgtacttactagagcaataagacaacaaaaggagatcaaggggatacaaattggaaaggaagaagtcaaattttcactatttgcagatgatatgatagtttacataagtgacccgaaaaactctatcagggaactcctacatctgataaacaccttcagcaaagtggcaggattcaagattaagtaaaaaacaaaaaaaaaacaaaaacaaatgacagactgaaaaagaaatcagggaaccatcttaaatgtcatatttatgtagatctctgaagtgtttgaaaatgacctgtctaatatatctgtttgaccttgaaaatatacctaacaggacaagtttgattataataggtgactaactattagcctgcatttctttattatcctaaatagtttttaataataactttcaaggaccaaaaatgtacattacattgttgaatgagctatataggtatgataccttgaacaagagtagaaatgtatattcagtatgttctaacaaaaataaactcaaatttggccgggcgttggtggtgcacgcctttaatcccagcactcgggaggcagaggcaggtggatctctgtgagttcgaggccagccgggtctataagagctagttccatgacagcctccaaagccacagagaaaccctgtctcgaaaaaccaaaaaaaaaaaaaaccctcaaatttgtaccaatattcaaaaactatctcaaacaagagtagaaacatatatccagtataacaaagataacctcaattttgtatcagtatacaaaaaccaatactaatgaaaaatatttaagactagtagttgcttttttggtttaaaagtagattaaagaaatctattcttttaacctatcatatctatatctccccctttccttttcagaacaagaaccctgaatctaatttcatttgttcagcttttttttcctgatcactgctataacagcttgtaactaaccaccccaaacaataacaatatccataacccattgaatgaccaaaaacacccatcctacctcttggaaatgtgggcttcatattcttaacattacttcttgtggtaagtaattttatgatggcatctttagggaaccctgaaaaaaattgggataattgtcaagtcctgggctagctatctgtatcatttgttgttcagtctctgtataatggaaaagtacagggcttatctcaaggtctggctagagtagtctgtgaggctggaccatctcagctacccaccttgaaattgtcctgagcaatttgacatccaaaaccaatctttgggtgatgtttgttggcttagtgaccttaccacaatctaggtggaatctttgttgtggggccccatcctccttttggagacttcaaaggttgctgtaggcatggtaatattttactgcagcaaacttaagcttaagttttaaatgtcatatgcagcagatcttgaagaggttaaaggaccataatttgctatgtacatctagagtacaaaaacttaattcctagttagctgatagagactcaaacccgaaatcatatacaggaaagtagatgaagcctttttctagaattagttctctatataatcatttatatcatgacaaaagttgaatatatgtaaatattataaattttgatataatactcatacattaaatgttttaaagaatcaaaaccaaagaattatgagtttagtggcaatagaatagtcctttaaattttgtttttcttttatcacatatcaggtggatcttctgacatgatacagagattttggattttcttttggcaagcatgcttgagggaccaactagggaccagaaggaggtatgtgagctgggcaggcatgccccaacctactgacctgggactgaaaggaggtgtgtgagctgggcagcccagaatcatcgaaatcatctgctgcctgaaattatagtaagaagctccttttggaaagagcacctgtgtcccagcaagcctccagtgccattctctgtatatgatacccagcagtatcagtgaccttcagagcatcagaaccgcctacacctagaggagtgatcgctagagatgtggccttgcttacacctggaggactgatcaatgaagctgagcccctaactacaccaattggagagagagggaccccctgaaacacaggttccacatataccaattggtggaagagattggtaaacaacaaggtaagaatacactcaaagagcaataaagcaccgccagaaactagtggttctacaggaacacaacctggacatcccaacacagatgaagcagaagaaaatgacctcaaaaataattttgggaagatgatagaggctcttaaagaggaaatgaaaaactcccttgaagaaatggagggaaagacaaacagttggaagaaatcaacaaatctctaaaagaaaatgaagtcaaaacagtcaaacaggtgaaggcaatggttcaagacttaaaaaatgaaataagcacaataatgagaacagcgaccaaggaaattctggaaagggaaaatatgggtaaacaatcaggatctattgatgcaagcataaacaacaggatataagagatagaagagagaatctcaggcattgaagacatgatagagataataagagtcatcagtcaaagaaaaatgttatcaaacaaatttttaacaaaaaatatccaggaaatctggaacaccatgaaaaggaggaaccttagaataaaaacaggaatagaagaaggagaagaaatacagctcaaaatcacagaaaatatattcaacaaaatcatagaagaaaacttttccaacttaaaataggacatacttatgaaagtacaagaagcttacaggacaccaaatagactggacaaaaaaatccccttcccacataataatcagaacaacaaacctacagaataaagagaatattaagagctgcaaaggaaaaaaggccatgaaacatataaaggcagacctatcataattacacctgacttctcactggaaaaaatgaaagccagaaggtcctagacaggtattatgcagacactaagagaccatggatgccagcccagattactttacccagcaaagctttcaataattatagatggagaaatcaagatattccatgataaaaccagttttaaacaatacctatacacaaatccagccctacagaaagtactagaaggaaaactctaacacaagaagttagctacatccataaaaaacaggcaatagataatctccaaacagcaaatcccaaagaatggaaaagtacacactaccaccaccaaaacaaaaacaaaaaacccaggaactagcagtcactggtcattaatatccattaatattaacggattcaattctcctatacaaagacacaggctaacagaatagatatgaagacagaatccatccttctgctgcatacaagaaacacacctcaacttccaagacagacattaccttaaagtaaagggttgggaaaagattttccaatcaaatggacctaagaaacaagctagtgtagctatcctgatatctaacaaaatagatgtcaaactaaaagtaatcaaaaggatggagaaggacattttatatttgtcaaaggaaaaatccatcaagaggaagtctcaattctgaacatacattccccaaatacaagggtactcacatttgtaaaagaaatattactaaagcttaaatcacacatcaaggctcacacactaagagtgggagaccccactttcaccacttaccccactttcaccactggacatgtctgccagacagaaacttagcagagatataaaggaactaactgatgttatgactcaaatgtgcttaacagacatctatagcacattccatcccaaacacaaagaaatacaccttctcagcacctcatggaaccttctctaaaattgactatatactcagtaacaaaacaaatctcaacagatataaaaaaattggaataaccccctgtatcttatctgatcaccatggcttaagttagaattcaacagcaacatcaatttcagaaagcccacaaacacatggaaattgaacaatgatcaactgaatcaccactgggtcaaggaagacattaaaaaaaagaaattaaagacttcctaaaattcaatgaaaatgactgtacaacatacccaaactaatggaacactttgaaagcagtgctaagtggaaagttcatagcactaaatgcctccataaagaaactggagaaatcccacactagcgaactaacagaacaactgaaagctctagaacaaaaagaagcaaactcacccaggaggaatagatgttgggaaataaattgagggctgaaatcgatgaaacagaagcaaagaaaacaatacaaagaatcaatgaaacaaatagttggttctttgagaaaatcagcaatgtagacaaacccttatccaaactaatcaaaaggcagagagagaatatccaaattaacaaaatcagaaatgaaagggggccataacaacagacactgaggaaactcagttcaaaaacctacactccactaaattggaaaatttaaaggaaatggataatttcctggataagtaccacatacccaagttaaatcaagaccagataaacaaattaaatagacctataacccctaaggaaatagacagttatagtgggaaattaccaatacggagtcaggtagaaatataagggtatttaatagggaaaagccttacttacagagcgacctagccagccagcgtggcagcagtctgtacacaagcccaaaagagaaaccgaaagcgaaaacgcagtcaccctatgtcccctgaccacgccctcacaagcgtggtcaggcacacctgtagctagcccctaagaaggcgtggctacagcttcccctacaattccccttttagtctaaaagaggaataaaacttaacagtgtaaattatccaaaattaacaatcataaaggtaaaatataagaagatacaataatctgcttatgtcacatcctaactgtctattttaactaaaccctaaagtcatctaaaaggggtgtccaagcctgaacacctccttcaaatcccaaccataaacaataggaagctattgctaactaggtatatacactatcctaagtgacaacaatggggaaagggggcgtagcattctccaagttacttcctgctgcaatggnnnnnnnnnnnnnnnnnnnnnnnnnnnnnnnnnnnnnnnnnnnnnnnnnnnnnnnnnnnnnnnnnnnnnnnnnnnnnnnnnnnnnnnnnnnnnnnnnnnnnnnnnnnnnnnnnnnnnnnnnnnnnnnnnnnnnnnnnnnnnnnnnnnnnnnnnnnnnnnnnnnnnnnnnnnnnnnnnnnnnnnnnnnnnnnnnnnnnnnnnnnnnnnnnnnnnnnnnnnnnnnnnnnnnnnnnnnnnnnnnnnnnnnnnnnnnnnnnnnnnnnnnnnnnnnnnnnnnnnnnnnnnnnnnnnnnnnnnnnnnnnnnnnnnnnnnnnnnnnnnnnnnnnnnnnnnnnnnnnnnnnnnnnnnnnnnnnnnnnnnnnnnnnnnnnnnnnnnnnnnnnnnnnnnnnnnnnnnnnnnnnnnnnnnnnnnnnnnnnnnnnnnnnnnnnnnnnnnnnnnnnnnnnnnnnnnnnnnnnnnnnnnnnnnnnnnnnnnnnnnnnnnnnnnnnnnnnnnnnnnnnnnnnnnnnnnnnnnnnnnnnnnnnnnnnnnnnnnnnnnnnnnnnnnnnnnnnnnnnnnnnnnnnnnnnnnnnnnnnnnnnnnnnnnnnnnnnnnnnagtgtcctttgacttctggagatgagttttcctgtgaagataaaaacaaaacacttccctttcctttgtgagatttctatccagtttatgagatataccttggtagagtacctgtcatttctcctcgtcgaggtttttcctttgcaactcgaatcttgaacaactttgatggtatccaaagttttcttctcctgtggaaacaaatgcaaaaccccaactccagcgtaacacatgtcctggtttccattcagaagttagtacatctttgaagtnnnnnnnnnnnnnnnnnnnnnnnnnnnnnnnnnnnnnnnnnnnnnnnnnnnnnnnnnnnnnnnnnnnnnnnnnnnnnnnnnnnnnnnnnnnnnnnnnnnnnnnnnnnnnnnnnnnnnnnnnnnnnnnnnnnnnnnnnnnnnnnnnnnnnnnnnnnnnnnnnnnnnnnnnnnnnnnnnnnnnnnnnnnnnnnnnnnnnnnnnnnnnnnnnnnnnnnnnnnnnnnnnnnnnnnnnnnnnnnnnnnnnnnnnnnnnnnnnnnnnnnnnnnnnnnnnnnnnnnnnnnnnnnnnnnnnnnnnnnnnnnnnnnnnnnnnnnnnnnnnnnnnnnnnnnnnnnnnnnnnnnnnnnnnnnnnnnnnnnnnnnnnnnnnnnnnnnnnnnnnnnnnnnnnnnnnnnnnnnnnnnnnnnnnnnnnnnnnnnnnnnnnnnnnnnnnnnnnnnnnnnnnnnnnnnnnnnnnnnnnnnnnnnnnnnnnnnnnnnnnnnnnnnnnnnnnnnnnnnnnnnnnnnnnnnnnnnnnnnnnnaattaataaatgatcaatctcgtcattgccttgtgctagtgggcctggcaaactcgtatgggatctgatatgtgtaatatatataggattgcttctgtttctgatagtctcctgtaattgtaaaaacagagaagttaattctgtattatcaggaacaaattctacagtctcaatatgtaacatgactctctctgcatattgagaatcagtaactatattaagaggttctgtaaaatccttaagtaccatgagaattgcatataattctgccttctnnnnnnnnnnnnnnnnnnnnnnnnnnnnnnnnnnnnnnnnnnnnnnnnnnnnnnnnnnnnnnnnnnnnnnnnnnnnnnnnnnnnnnnnnnnnnnnnnnnnnnnnnnnnnnnnnnnnnnnnnnnnnnnnnnnnnnnnnnnnnnnnnnnnnnnnnnnnnnnnnnnnnnnnnnnnnnnnnnnnnnnnnnnnnnnnnnnnnnnnnnnnnnnnnnnnnnnnnnnnnnnnnnnnnnnnnnnnnnnnnnnnnnnnnnnnnnnnnnnnnnnnnnnnnnnnnnnnnnnnnnnnnnnnnnnnnnnnnnnnnnnnnnnnnnnnnnnnnnnnnnnnnnnnnntttaaaatcaaatcagaaatcttttctatatatgtctttaactttttattctgtttatgtggcagaaatatccattccaatatagtgtcttccctctgcatcagaattccagatggcaagataacttttatagctatatctgccacgtatggtttcagtatccctttctgtcctnnnnnnnnnnnnnnnnnnnnnnnnnnnnnnnnnnnnnnnnnnnnnnnnnnnnnnnnnnnnnnnnnnnnnnnnnnnnnnnnnnnnnnnnnnnnnnnnnnnnnnnnnnnnnnnnnnnnnnnnnnnnnnnnnnnnnnnnnnnnnnnnnnnnnnnnnnnnnnnnnnnnnnnnnnnnnnnnnnnnnnnnnnnnnnnnnnnnnnnnnnnnnnnnnnnnnnnnnnnnnnnnnnnnnnnnnnnnnnnnnnnnnnnnnnnnnnnnnnnnnnnnnnnnnnnnnnnnnnnnnnnnnnnnnnnnnnnnnnnnnnnnnnnnnnnnnnnnnnnnnnnnnnnnnnnnnnnnnnnnnnnnnnnnnnnnnnnnnnnnnnnnnnnnnnnnnnnnnnnnnnnnnnnnnnnnnnnnnnnnnnnnnnnnnnnnnnnnnnnnnnnnnnnnnnnnnnnnnnnnnnnnnnnnnnnnnnnnnnnnnnnnnnnnnnnnnnnnnnnnnnnnnnnnagaaggcagtggccttccatatgaggcattgttagaattcatttgtctacaatttctcttagtatgtcccattttaccacagttgaaacatctaggttcctggcacctttgtggtctccaggggaaggctcttcctacccaagattctggttcatattaggagtaacctctagtctcttggtatgtatgttgacctctgtaaggtgcttctccttgccaagcccttacatcctcnnnnnnnnnnnnnnnnnnnnnnnnnnnnnnnnnnnnnnnnnnnnnnnnnnnnnnnnnnnnnnnnnnnnnnnnnnnnnnnnnnnnnnnnnnnnnnnnnnnnnnnnnnnnnnnnnnnnnnnnnnnnnnnnnnnnnnnnnnnnnnnnnnnnnnnnnnnnnnnnnnnnnnnnnnnnnnnnnnnnnnnnnnnnnnnnnnnnnnnnnnnnnnnnnnnnnnnnnnnnnnnnnnnnnnnnnnnnnnnnnnnnnnnnnnnnnnnnnnnnnnnnnnnnnnnnnnnnnnnnnnnnnnnnnnnnnnnnnnnnnnnnnnnnnnnnnnnnnnnnnnnnnnnnnnnnnnnnnnnnnnnnnnnnnnnnnnnnnnnnnnnnnnnnnnnnnnnnnnnnnnnnnnnnnnnnnnnnnnnnnnnnnnnnnnnnnnnnnnnnnnnnnnnnnnnnnnnnnnnnnnnnnnnnnnnnnnnnnnnnnnnnnnnnnnnnnnnnnnnnnnnnnnnnnnnnnnnnnnnnnnnnnnnnnnnnnnnnnnnnnnnnnnnnnnnnnnnnnnnnnnnnnnnnnnnnnnnnnnnnnnnnnnnnnnnnnnnnnnnnnnnnnnnnnnnnnnnnnnnnnnnnnnnnnnnnnnnnnnnnnnnnnnnnnnnnnnnnnnnnnnnnnnnnnnnnnnnnnnnnnnnnnnnnnnnnnnnnnnnnnnnnnnnnnnnnnnnnnnnnnnnnnnnnnnnnnnnnnnnnnnnnnnnnnnnnnnnnnnnnnnnnnnnnnnnnnnnnnnnnnnnnnnnnnnnnnnnnnnnnnnnnnnnnnnnnnnnnnnnnnnnnnnnnnnnnnnnnnnnnnnnnnnnnnnnnnnnnnnnnnnnnnnnnnnnnnnnnnnnnnnnnnnnnnnnnnnnnnnnnnnnnnnnnnnnnnnnnnnnnnnnnnnnnnnnnnnnnnnnnnnnnnnnnnnnnnnnnnnnnnnnnnnnnnnnnnnnnnnnnnnnnnnnnnnnnnnnnnnnnnnnnnnnnnnnnnnnnnnnnnnnnnnnnnnnnnnnnnnnnnccttcagctgtataggttgccattcataagccatctgtccatgagggtgtttcttagaagctggcttttctaccatggtagctgggtacactagtggtgtaccagtaacaaccttagaatagtcatgatacctaggtggagtaggattggagtgattctgcttctgaggcatcccaattatctttaagcctggcaatgatatccttttgaaaagtttcaatctccttaatcataaaagattccaagcatgttagtgaatctgtaaatcgctctaactgctcctctacacgtttttctagtccttagacagcatctggatggtatggaaactgtcttctaggtattggagtctagattctcggtcatgatttgcttattttgattcctcagcaatcgactgtatggacctatctaatttgtcagccctgttttgtaaattatcttccaaacatttgaacttagattcaaatttgtgatctgctactttagatgcttcaataattgatggaatggcattgtccaattcttcaaccctatcctgggtattttgcacctttgcatcatctagtttctgggtcacagagcctatctgagtttctagctggctacagatattcttagttcgtcacagtcctctgacagcctagcctctaatgctccagacatggaggatctctctgtgtttatcttatcataaatacactgcatctcatcttgggtaacagacagctctgtctttagtgtactggagatagagcccagcttaacaccctacttctgttccactttctgcacaattgtggcctgacctaatctgttctccaaaacctcattgagtaaagctgttatttcctgtaagcaggtagtgaggttatctttgtccctgttcctgggaactctggctagtaatgttatttgtaccagcaagctaactgccattactgcatatatgcaggtaattggcagattagtgtcctcctcaaacattgaattcacgtaataagcaaagatattaccaattatagaaaatgataaatattccgccatgattttacctgatttttaccccagatgcagtaaatatctttggtcagcaggtggctcaggcgttaagctagtccgcgcagggcccgatggaacccacagcctatcccaaatggggtgcaggtttccaatatcccgctcctgacaaccggatatagtgggaaattaccaatatggagtcaggtagaaatataagggtatttaatagggaaaagccttacttacagtgacctagagtgacctagccagcctgcgtggcagcagtctgtacacaagcccaaaagagaaaccgaaagcgaaaacgcagtcaccctatgtcccctgaccacaccctcacaagcatggtcaggcacaccagtagccagcccctaagaaggcgtggctacagcttcccctagagacagtcatcaaattctcctcaccaaaaaaagcccagggccagatggcttcagtgcagaattttaccagaatttcaaagaagagttaacaccaatacttctcaaattgttccacacaatagaatcagaaggaacattatcaaactctttttatgaggttatagttacactgattcccaaaccacacagagatgcaaccatgaaagcgaattacagaccaatcttcctcatgaacattgatgcaaaaaatactcaataaaatactggcaaactaaatctaagaacacatcagaaaaatcatccaccatgattaagtaggcttcgtcctagagaaacagggatggttcaacatgaaaatccttcaatgtaatctaccatctatcaaactaaaacaaaaagagcacatgatcatctcattagatgctgactaagccttagacaaaaatccaacaccatttcatgataaagatcttggggagatcagggatacaaggaacattcctaaacacaataaaggcaatatacagcaagccaatagctaacatcaaattaaatggggagaaactcaaagtgatcccactaaaatcaggaacaagacaatgctgtccactcactcttatctcttcaatgttgtattataagttctagctagagcaataagacaagaaaaggaaatcaagggatacaaattggaaaggaagaagtcaaacttttgctatacacagatgatatgatagaatacataagagactccaaaaaattctaccaggaaacttctatctgataaacacattcagtaatgtggtgggatacaagattaactaaaaaaaatcagtggcccttcaaatatagatgatatatcggctgagaaaaatcaaagaaacatcacccttcacaatagctacaacaaacataaactatcttgggggactctaatcaaacaagtgtatgacaagaattttaaataagtctttgatgaaagaaattgaagaagacctcagaaaatgaaagatctcccatgttattgggtaaataggattaacacagaaaaatgacaatcttaccaaaaacaatctacagattcaaggcaaatcaaaatcccagaaaaattcttcatagatcttgataaaacaatactcaactttgtatgaaaaaaaaaacaggatagccgaaacaatcctgtacaataaaggaacttctggaatatcaccatccatgactaatgatacagtaataaaaacagcttgggactggcatgaaaacagacatgtggaccaatggaatcgaatcaaagacactggtatcaatccacacacccaagaacacctttgacaaataagctaaaactatcaaatggtaaaaagaaagtatcttcaacaaatggtgctggcataactggatgttgacatgtagaagaatgcaaatagatccatatctatcaccatgcacaaaactcaagtccaaatggatcaaagacctcagcataaaatcaaccacactgtacctagcggtggtggcacatgcctttaatcccagcacttgggagacagaggcaggcagatttctgtgagttacaggccagcctggtctacaaagctacacagagaaatcctgtcttgaaacactatccccaacccaaaaaacctaccacactgaacctcatagaagagaaagtggggaagtagtcttgaacatatagatgcagaagactatttcctaaacagaacaccagtagcacagatactaagagcaacaattaatatgggacctcctgaaactgagaagcttctgtacagcaaaggacacagtcaacaagacaaaacatcaccctacagaataggaaaagagcttcaccaacatcacatctgacagaggactgatctccaaaatacacaaacattcaagaaactagatataaaaagaccaaataatccaactaaaaacagggcacagttctaaacagagaactgtcaacagaggaatcccaaatggtggaaagacacttaaggaaatgcttaacatccttagccatcagggaaatgcaaatcaaaacaactctgagataccatcatacacctgtcagaatgtccaagatcaaaaacatcaatgacagtttatgctggagaagatgtggagaaaggggagcactcctccactgctggtgggagtgccaacttgtacagctgctttggaaattagtatggcgatttctcagaaaattgggaatcaatctatcacaagacccagcaatatcacttttggacatatacccaaaggatgcatactcacaccacaaggacatttgcagaattatttccgtagcagcataatttgtaatagtcaggaactgggaacaacctagatccccctcaactgaagaatggatagagaaaacatggtacattaacacaattgagtactatttagcagtaaaaaacaatgaaatcttgaaattttcaggcaaatgaatggaactggaaaaaaatcctgagtgaggtaattgagacccagaaagacaaatataatatgtactcaatcctaagtggatattggacataaaacaaaggataaccagcataaaggccacaacccatgagaacctaggcaaaaaagagggctctaagagagacatacatggacctgcctagatatgggaaaaagacaagatctcctgagtaaattgtgagcatggagtgagaggggaggagggaaagggagtggggaaatgcataactcaataaaaacaaagttaaaaaatgaaaacagaaagaaaaaccaatcatgcttgggtttagagaaggagagagccacacttcaattccaaagccagctttagtttttaattaaactgggactgtaaacagaccaattgcatcgtatgcctgcagagaagagcagaaacaaacgtttgggaagatttatgaaatattttcctgttggatatgtgatttatcattaggcccgtttactctttttcttgggacattttctctggatgattcatccttttcttcagaagtctcatttgtccaatggtcttcagattccttagttagatgccttcattctcctgaaaaaaaaaacaaaaacaaatccctgccccaacataactttgaggagtttcctttttggcaagttatgtctgatcaaatgaaaagcatttcttagttttataagttagtttatattaaacagccatgctgcttgatggtctatcacctcttctaattaagagatctctcttgttaaaattgaatctttatcaattttgatggtgtccatagcttttcttctgtggaaacaaaagcaaaacctcttcccagtgtaacacatatcctggtctccattctgaggtcaacacatccttaaagtgtacaggctgatttaattcagtagtttttctaatattcaatgtctcttcacagttgttgttctcttctcattagcatttagaaaatttgaagttaataacacattatgcaatctatctctgggggtctctattattcatttctatttattaagcatatcttttagagttcaattagatcttcatataattgcttgccctgtaggattgtgtagtatatctgtgatatgctttatgccataatatccaaaaatctgtttcattttactagagccatatgctggagctttatcagtcttaatttgtgcgggtatacccttgatggccataacttctaacaaatatgtgattacagaatcagcattttcagaactcaaagcagtagcctatttgaaatcctaaatctttacctatgatatggttttaatattttaattttccaaattctacaaaatagaacacatatcctccaaatttcatttctttttttcccaaatttcatttcttagagtactctttggtttacttcctgcaggtagtggagtttggttgtgcaaagaacaagtaggatatttccttataatttctttggctgttgccaagtgatggaaaaatcttctttcaaacccttactattgacatggtgtttttaatgaaatcctaaggcttttagcacatttcctatgaatagttgatcaatttcatcattatcttgtgctagatggccttgtagcctcttacagtagctaatatgtgctatatataaggggtgattactattctgattattgtaattgaatcaatcataaagtcaattctgtatcatctggaataatattcagcaatttcaatatgtaaaacaactctttctgcacattgagagtcagtaactatattaagatgttctggaaaatctaataataccatgagaatagcgtataattcctacttttgaacagcatcataatggctttgatccactttatcctaatttcttgatttataacctgcctttcctgatttgtttgcatcagtatagaatgtacggggtacagaaatcaatgttccttgcatgatatgaagaaagatccagttagttctctttataaaatgatttctattgcttttgggatatttattgttaatatctcctgtagcatgaaaaacaaaagacccagagacagatactggggttcaagctttaagttgaagatcagagaagcaaggcagccaagccagtaggtcttccctctactcagctgaaatgacaatcctgtctccacaaaccctcagaagcaaaagctctcagtttcttcctcctccttttattcctctctctacccagccatatcctcctgtctccacctccctagtgcttggattaaaggtgtgtgtgatcccaagtgctgagatcaaaggtgcttcctgagtccttggattaaagctactacaatttctgctgggtctattactgctaattggcaaaatctcatttttcctttaagaatcagctcagaaacctttcctacataggtctttttttaactctgtgtgataaaaatatccaatctaagatattttctctctgcattaaaattcttttaggtgaatgcatagaaggtaaaataaccagaataaaatctagctctggatccaaatgatccacatgttcaggagtaatttcttttctaccaaagccaattctctctcagcttcagatgataatttttttggactatttacgtccttgtcaccttgtaaggtttgaaataaattatttagttctttagtcattaatccaatcgtgtgatgtagccagttaatgtctcccagcaattttcaaaagtcattaagagtctgaaattgatctctcctgatttgtatcttttgggattaagtttttttgtaatcctattttatatcttaggtaattaatagaatctcctctttgtatttttttcaggagcaacttgtaattcctcacaaggcaaaattttcttcttcaaacattttctctaaggtgtctacatttgaatcagctagtaaaatatcacccatatattggtaaattatagattgaggaaactgtatactaatcattttcaacagctgtcatataaaatattgccacaggatggggctgtttaacatcccttgtgggggaatcttcctctcatatctcttaactggctgagaatcataagcagacacatgaaggcaactttttctctgtctttttcttgtaaaggtgtagtgaagaaacaaccttttaaatcaataactgtaagaggccatcctttaggtaatagagaatgcaggggaattccagtctgtagagagtccattagctgaattactttgatgactctcaaatatgtcaacaccctccattttccagatttctttttaataacaaatacaagagaattccaagtactggcctattcttcaatacgtttagcatttagctgttcctgaatcagctgttctaaggcctgtagttcttctgatgtcaaaggtcactgttttatctagacagatttgtcagttaaccattttaaaggtagggatgtcagtacctttgaaaggttagcagtcattttgccctgttgttttacaacctgaaggttgatgactgttctttataatagcttttaatattttccccagaaatatacattagtttatggtttgtttctgagactggaggaatgttaatttgggtattccattgctgtaaggaatcatgcccccatgaattcattgctggttagctaatatggctttaattttcctctgtccttctggccctatacattccacccatcttgtgcttaattttacatgagataaagttccaatccctaaaagctgaacatttacttcctgaagagaccaatttgtatgccaaggttctagtgcaattattgttacatcaacacctgtgtctataagacctttaattacaatgccatttattcatatttttagttttggtctttgatcatttatagaagtttgccaaaatattttctttatgctttctcctgaaacttttgtcttatcttctaaagctgttctattatccagagcagtatggtttttataataggcattaggtcctttaattgctctggggaggactttccccaactgtgacagagaatgacagaacccagtttggcatgggggactgcaagaagccccctgaggcatttcctaacgacaaagggttaccttgtctgtcccttgttgatctgcattcattggtccaatgtcagcctttggcacactttctgcatactccaaaaggcaggggccttatgtctggattaaaagaaacattgtttctaagaatgccctgtctacaatccctttttaggtgaccttgtttgccacaattaaaacatctgacattttgatttttcttcaagcctctggaaatcacctgtcttatccaattttcatcgtggttatgatattcagtattgactacatcttgggtccattcctctatgggtactgatcttgcctttaaaggcctaattatctttttgtattgtgaataagcattttcatgagctagagattcaattattatttgtctagcttctgaattttgtatcattctatttacaactgaagtcaatctttgtagaaaaatatcagtgaaggcttcttttgggccttgtataactttagtcaatgactcatatctctttctgagttctttaaatctgtctcaagcattcaaagcagctgtacagcacatagccaaggtgtggtcatcatatagagactgtctttgtacatcagcataatcaccctccaagaatttggtattatgaaatttcaatacctctagccttactttgttgttcaatggtcctactctcatcttttcaccaggttctccactgcaatttaggactaggctccaaaattgctgtaactcagtcttttcagtcttgtgggacaattctgtcactaatcgacaataaatttaacatctgcttcacaaatggtgaatgcatgccatatgagactattgcttccttaaattgcctcgaatctaacatttccacaggaatccagttggatcttacacaaccttggggatatctgtcatttggcagttgttcctgtaaagtgtctggataaattaaagttgtttgataaccttgggctgttcctctccaaccttataatgtaacgtttgaggttggtactcctctaaattcttctgtctttatgtgaatatctcttgaggcttgtaacttatcaatcaaaatgccattattttctccactaaatttttctaaaccctgtatcttggcattcatatcaaccaacttggcactcatatcaaccaatttttagggataaaacaagaattatcaaactaataatgttggccgggtgttgttggcacacacctttaatcccagcacttgggaggcaaaggcaggcggatctctgtgtgttcgacaccagccttgtctacaagagctagttccaggacagcctgcaaagccacagagaaaccctgtcttgaaaaaaccaaaaacagtacaaaccattaatgtttagaattgacattacataaatcccatctaagttaattatcccctcatttaattgttccatttaaaccatccattatgtaatcataagagacctaactcccttcatagcagtgtttccctttttaaaattttattttatgtatatgagtgctctatctgtatttatgcctttacaccagaagagggcatcctatctcactacagatggttgtgagccaccatgctgggaattgaactcaggacctctggaagagtagccagtgttcttaaactctgagccatctctccagcctgtgtttctcatcttttaatgtgggaaaaaactttcttttttaaaaagtaattatcccctttcaaaatttccaattgtctcaccaaatctgctgatgaagatggtggactgtgaggctagctgccctggtgtatcatgtctctcaggagaataaagacaatgaacagcctgtctgagaacagctgccactgaatgagtgtcatcagcttgaggggggggggaatccagggaaagcccacaacacacaggaaaatgaagccagagagccagatgtctgcatgggggatcgtgcaaaaatggctaactctggtggtgtttggaacccgaatacctatggcatttgctgtagagaggctgcaacagaaaaatcacacactcactcagaggtcttgggaaaaaaaagaaaacctagccggcagggcagtgactttggtgggaggaccctttgtgtgatggcgattgcaaagccatgggcaagcagctttttcatgaattcgtgtgatggggaaagtacttctgtgtatgtttatcttattgattgttgaataaaatactgtttggccaatgagacagcaaattagacggaactaggagtcaaaggattctgggagatgtagtagagaagtagtgatccaggcaggaagtgacatagcaaggagactcatatttaagcgaaggagaaacaggaaggggccctttttcccgttcgactcttccagcagcaggtggtgagccaccggcaaggagggacgccaataaggcgtccaataagataagtcttataaaatatatagatgtatgataattgagactgagctaacagatgagaatcctagtcattggccaagcagcattgtacctaatacaagtttctgtgtatttatttggccctaactcaggcgggcggctggtataaagctcacacgtggcggtggggctcaggcagcttttggcggaaagatttatcgtaacattagtgtctcccaaattggactccagatgaagtgttaatctaattaatcttataaataaaagccaggagttggatattggggttaaaaacctggaagatcagagaacccggagcagctgccagttgcttcctacctgtctcattcctttacccaaaaagctgagatgctgtctccaacccacctaatcacttcctatatctacctccccagtactgggattaaaagcatgagccaccactgcccagattctatggttaacgagtggctacctacacccactgatctccaggcaagctttatttgtcagaacacaaagtatcatacaacactgcatccagaacaacttcaaagctactagctgagatggtccagcctcacagtgtattccacctaggacttcagataagctctatactttcctatcacacaaagactaaacaaaaaataatacagctagctctctcaggacttgactattatccagatttcttcaagatcccctaaagatgctgtagcccccagacaacaggaagtaactttaataatatgacacccacattcccaaggattggggtgggtggtttttggtcatccagttgggttatggatgtttatcatcatttaggggggttagttacaagttgttgttagtcaaagtcaggaaaaatgctgaacaaaggaaattagattcaggagtctcattttctcaagaaaaagggggatatagaaatgataggataagagggtagattagtgaatctactttcaaacaaaaaagcaactactagtctcaaatattttatattggtgtggacttttgtatattgatacaaatttaaggttaattttgttagaaaagtctctgtatatgcttctactcttgctcaagatatttttgtacattgatacaaatttaaggttatttttgttatactgtatatatgtttctactcttgtttaaggtattgtatgtatgcagctcattttaaaatgtaattaaagttttagtctttaaaagatatttaggataataaataaagacaggttagtaatggtctataataatcaaacttatagtcaggtatgtttttaaggttgaacagagattatattttagatagatgatctccaaacacttcagagacctacagaatatggcatttgaactgttttaataacatagggttttcatgacagtgagacatggctgctcctggtagcaccaatctatttcatgaaaggatgatgggtatcaaagaacctctatatggagtttgctttctatgtggcaaagccagccactggacaagcaactacctttgccttgactactggcaatatgctgtccagattggacaagcaggacacaaaagaaggcgactgcggaactttgccaagacaaagtaggacagtccttcaaattatcctgcttcacaaaaagtcgtttatacattctaggcctgtaggccaaagattggtgcaccaatgttacagagaaaccttgggtgactgtccagacagccagatgtttctgtcatttctatagttttggaagttgtttgctctaaacttcctgtttacccaggtaatattttatccttctcaggtctttgatggtgttaaagactagatagttttagttttacagttttccttgttaccaaattgaaaaaagaaacttacataagacatgtgaaatttataaggttgagaaacataaaagcttaagttgtttatctaagatgtttttggtctaaaaagatacttttaggatggtaatacaagctatgatagaaagtggtttaggtataaaatcttggattcagtaagataggatagataacagaatgatttctttgaattttccaaatgcaaatggattagacattgtgaacgtaatccttacataactattattattatatatagtcttactatgtcaaagttaaaaaacctttcctttttattcagacaaaagagggaaaggttgtggggtatctgtacactgtatgaagatgtattgctgtgattgataataaaaagctgaatagccaatagctaggcaggaagtatagctgggatttctggggagagaaaggaagaggaagagaaatctcagcacacagaagatgccaggagacatggagaggaaacagaagggggaagacgaaaaagaggtaatgccatatgatagaacatagattaatataaatgggctaatttagttataagagatagtgggacaagtctaagctaaggctgatgtatgcagctcattttaaaatgtaattaaagttttagtctttaaaagatatttaggataataaataaagacaggttagtaatggtctataataatcaaacttatagtcaggtatgtttttaaggttgaacagagattatattttagatagatgatctccaaacacttcagagacctacagaatatggcatttgaactgttttaataacatagggttttcatgacagtgagacatggctgctcctggtagcaccaatctatttcatgaaaggatgatgggtatcaaagaacctctatatggagtttgctttctatgtggcaaagccagccactggacaagcaactacctttgccttgactactggcaatatgctgtccagattggacaagcaggacacaaaagaaggcgactgcggaactttgccaagacaaagtaggacagtccttcaaattatcctgcttcacaaaaagtcgtttatacattctaggcctgtaggccaaagattggtgcaccaatgttacagagaaaccttgggtgactgtccagacagccagatgtttctgtcatttctatagttttggaagttgtttgctctaaacttcctgtttacccaggtaatattttatccttctcaggtctttgatggtgttaaagactagatagttttagttttacagttttccttgttaccaaattgaaaaaagaaacttacataagacatgtgaaatttataaggttgagaaacataaaagcttaagttgtttatctaagatgtttttggtctaaaaagatacttttaggatggtaatacaagctatgatagaaagtggtttaggtataaaatcttggattcagtaagataggatagataacagaatgatttctttgaattttccaaatgcaaatggattagacattgtgaacgtaatccttacataactattattattatatatagtcttactatgtcaaagttaaaaaacctttcctttttattcagacaaaagagggaaaggttgtggggtatctgtacactgtatgaagatgtattgctgtgattgataataaaaagctgaatagccaatagctaggcaggaagtatagctgggatttctggggagagaaaggaagaggaagagaaatctcagcacacagaagatgccaggagacatggagaggaaacagaagggggaagacgaaaaagaggtaatgccatatgatagaacatagattaatataaatgggctaatttagttataagagatagtgggacaagtctaagctaaggctgaattttcttttttccctcattttctttttttaaatttacgatttcattttacattccaaccacagttctccttcccactcctcctcccacctcctcatctcttcccaccccccacctcacagcccataccctgtccactcctcacaggtaagggctcctatgaggagtcaatatagtctggaataataggttaggtcagggacaggcccctctcccatgcattaagactgagcatgacatcccgccatagggaataggttccaacaagctagctcatgtactaggatttattgtggtccttctgacactgagcctggcatcccaccctaaggaatgggctccaacaagctagctcatgtaccaaattgtatcatggtcctactgccaggggcctctctgatagtccaagcttcacaactgtctcccacaaatggaggacctagttcagttccctggagtttctacagttgtaggtatagagttcatgagtttccatgtgttatgataactcttcccgccatcctggtcctagtgccttgtcagccccaaataacacacagagactctattagttataattctgttggccaatgtctagggcttcttattggctagctctgtcttaagtattaacccataactactaacatatgtatttctacaaagtctttttaaattttaattgttagtgttttttaatttaaattagaaacaagcttgcttcacacgtcaatcccagctccctctccctcccctcctcccccgcccccaccaactccccccaaacctccacccatcccctctctgctccccagggagggtgaggccctccctggaagaatctccacagactgtcatatcatctgggtcagggcctaggctctcccccgtgtgtctaggctgagagagcatccctccatgtggaatgggctcccaaagcccatttctatgccagagataaatactgatctactacccgaggccccatatattgctgaggcctcctcactgacacccacgttcagggggtctggatcagtcccatgctggcctctcagttattagtctgggatccatgggcaaccccttgttcaggtcagctgtttctgtgggtttcatcagcctggtcttgacctctttgctcatcactcctccttccctctctgcaactggattctgggaattcagtttagtgtttagctctgggtgtctgcctctgcttccatcagctactgaatgaaagctctaggatgggatttaaggaagtcatcaatctcattatcagggaaggacatttaaggtagcctctccactattgcttagatttccagttggtgtcatccttgaagagctctggaaatctcactagtgccagatttctcctcaaacctataatggctccctctattatggtatctctcatcctgctcttctgtattcttctcctgactcaaccttcctgctccctcatgtccttctctccccttctcttctccctctatctttctcctaactccctctccccttccccatgctccgaatcagttcaggagatcctgtcccattccccacatatggaggacctagttcagtcccctggagtctccacagctgtaggtctagagttcatgagtttccatgagcttggttcagctgtctctgtagatttctccatcattatcttgacctcccttgctcatatattccttcctccctctctttgacaggattcccagagctcaggctggttattgatagtggatctcttcacctggttccatcaactactggatgagggctctatgatgatagttggggtattcagaaatctaatcacagggataggcaagttcaggtatcctctctactattgctaggagtcttttatttttgtttttttaattttaattagaaagaaaagctgttttcaggactatagctctataatagagcttgaaatcagggttgtttgggctatcctgggtcttttgtttttccatataaagttacgaattggggattgggaaaagatattcttggggttctgacaggatatgtcctcagctgaagccgctaagaacactacccatgcacattcactaagttcccttttaaaaggtcccagagagcaagataagagataatgtaatagagggagacattataggtttaaagagaattcgggcactagggaaatgtctggagagctacaaagatgacaccaactaacaatctaagcaatagaggagaggctaccttaaatgccctctcctgataatgagattgatgactaattcatacaccatcgtatagccttcatccagcagctggtggaagtagaagcagataccctcatcaaagacctgagaaggaagataacattactagggtaggcaggaagcgcaggtgagcaacttccaaaggtgcatcgaagacagaaacagcaggttacctggacagtcacccaaagtctcacagaagcagctttggctaaggcctagagtatcggactgaccagcacagaagcatggaggtagaaaggctgtctcaccctgacttggcagggttcagcagtcttctaaattatctcctgcaagtacagtaggacagcatgtccaaagtcatcggtcgaagtggggacaattctttgcacaagaggccattagccaaagagagaatgaactccagaaggagtgacatcggtgcccaacattttctcaggaatagcttggtgctgtcaggagcaaatgcgtctcatgccaacagagtactaaaacatttaaatgccatagtgtgtaccaccaccacctcttagcttctggctgctgggattaaagttatgtgcctagcttgcatggcttgtggctgactttgctttctgaatcctcaggcaaactttaacaaaccattaatagtataccaccacagttgacattcagttattccagcaccatttgttgaagatgttttccttttttccattttgccattttgggttctttgtcaaaaatcaggtgttcaaaggtgtgtggattaatgtcaaggtctttgattggattctgattctgtatttttatctctagctagaaatgtcccttttctttctcttgatgttttcttcctaactctcttaatgttttcctcccaattctctcattcttgatggtttccttcttacttatatttattcttccttattctctcattcttgatgttttccttctgctccttctacttctttcttattcttccattcttgatgttttccttctaactctaccaatgttttcctcttaattctctcattcttgatgttttccttcccctactttctatttttcccttacagcttatatactccagcaaaatcttttaggcaataataaaaattacaatttggttacattgtgtttttcaagtgaatgattacagtgaatacaagtaaacagcaggttttccatatcccttaacatgattaaacattttgcatattacaggtgaaaaacaaattatcccaagaacccatatacattcatacccaagcaacttgttatagataagcagtgcaagcaagcaaagtattcttttactggaaggctacattttgcagctacaaagaaaagaccaattacttacctcgaaaggtaatcttataaggaatcttttttattttctcttccttttttatttgaattagaaacaagattgtgggctggagagatggctcagaggttaagagcactgactgctcttccagaggtcctgagttcaattcccagcaaccacacggtggctcacaaccactcgttatgagatctggtgccctcttctggtgtgcagatatacatggaagcagaatgttgtatacataataaataaataaataaaatctttaaaaaaaagaaacaagattgttttacatgtcaatcccagttcccacaccctcccctcctcccctatcacctcctccccaggaatcttaaagtaatcacaaacataaacttttatacatgaaagacaattagaagctctactttaaatcgttagggtgcatacccattcatcaatagtttttaatatcatgagatcgagggaaagaataggtataaggaattaatcatcacctttggtcaccaaccaatcctagcaagaaaggcatgtcagctaatgataattgggctgctttgttcttgttccctgaccttaaagagttcctcattcaactatgtgcctttctaaaactttagatgctcttcttgtgtttttcacctcaaagctatttaacaaaacatcttagtctaacttttaagttattttcaaagctttgtttcagctatgatgcactccaaaacctgtgaacacatctaacaaatttaaagttaaaagaatttaaactagctgggctactgggactcaattgtttttcttagtcattaaggaagccacagcctatatggttcctcagtagaaactcatgcattttagctgtgtgacacttccttgttttatttttttaatcatcaaaactcaatttaagaggagagagagcaggatgagagacaccatattagagggagccactatnnnnnnnnnnnnnnnnnnnnnnnnnnnnnnnnnnnnnnnnnnnnnnnnnnnnnnnnnnnnnnnnnnnnnnnnnnnnnnnnnnnnnnnnnnnnnnnnnnnnnnnnnnnnnnnnnnnnnnnnnnnnnnnnnnnnnnnnnnnnnnnnnnnnntatatacactgagctgaaatctggaacctagttgcagagagggagaaatgaagatcaaaggggtcagtaccaggttagagaaacccacaggaacagctggcctggacaagggggagcacatggaccccagatgctgtctgggaggctagtacaggactgatccagaccccagggagagggagagggagagggagtgggagaagggatttacatgtgaaacaagcttgttcccaacttgaactaaaaaaaaatattaaataacaaaagattgaaaaaaaactctatttaaactaacattattattatcaattagacagtacagcttaagaaggagtcatccacaagtaaaactgcccaatagaattggggcatttccatgagataaacatactacattatagacagtgaggatctccccacacccattcacaccattccagataccagagaaagatggcagtggcaagcatgtaaaagcacaacagaagcaaaaggcattttggagtctcagggttttgcctatctgagattcacccattggggattttcctcctgatggggtgacacctcaaacttcaattgccatctgctgttcctctgacatggccaccagaaagaccaaaaaaatcccaatgaaattgactaatgatattctaatgatatgtgtaggtcagaggacaacaggttgcttaggagagttcacacaagttgtcctctgacctacacatatgtaccatggcaaatgcaaacccacactcacaaaaaataaataaatgttaaaaaagtttgtggaaagcctcactgatagaatggttctgtgagggtcttacaagcttcatgatgtgagtttggtccctgggacccacataaaagtggaaagaactaactgactccacaaagttgtcctctgatttctccatatgtgctatggcatgtgcaaccttatgcacataacatatacataatttattaattaataaaacaagaatggatcaagtaaaggacagaatatttgagtttgaagacaagatggaagaattggaatatgaacaagaaaaaagattatccatggccatgctgtgaccagggtctgtgttgatgtcaatggctccttttaccaccaagggctgtgtggatgcctggtgtctgatcagccaccagaaacaagggtggtgtccaaccaacatgctattgctgaggccatactgatctgggtgacctgagctgccacaagtcccatggtgacatctagacctgagctgctgttgagagccatgtcggggttttgtggtcctgtcgaagctggggtctgtgttgatgtctgtggcttgtgtgaccacaggacatgggtgggggtaagcataagaaccatgcatgatgaaatccgagggccaggctgagctggccctgcccttctctggctccgcctcacggaagcaagatagctggccttgaccctcatgggagagctggccccaaagacccaggcacaggagagctggtccattgcccactggagagggcacatctctgaaggagatggtcccacccctcaccatgggcatgggagagctggccatgatgggtatgggagtgggtgtggcagccccagtgaacaagtctaaccagctcaactaccactgaggcccaaatccagggtattgggttggcccacattaatatctatgacctactggagcatgtgaagggagtggtcctatggaaagatacttgcaggatctccatgtcttggggtggacagggaatatctgagagttttggtgaggattcagtgatgatggtgtatcagatatcagagaccttgaaccagaccaatgactcattgcaatgaacatttgcaaacaaagctgaaaggaaaaaaggataccctgtgtgacacactgagactcccagtgccactaagaccaatgaaaaggtgccagagaggcaagaaagacagaggagcaaagtgatttttgtttgtttttaattaaaaaaaatttatggggaggaagatgctgcaagggtgaagggcagatatggagggactgggaaatgagcagaattggggtgcatgatgtgaaattcccaaagaatcaataaagaaattatgttaaaaaagaaaaaattactaagataaattacaagaagatacaaatgcaactttaaaaatattctggatactatgaaaagaccagatttaagaatcaggttctcaaacaggtctaattccattctaaaggcatataaaacattttcaatgaaataacagaaaatttcccaaattagagagatgtaaatccaatataagaaacatttatatcaccaagtatacaagaccagagaatgttccttcctcatattataattaagccactaaatatacagaacaaaaaagaatattgaaagcagcaagagagaagcaaaaagtcacctataaagaaaggcttgtcagagtagctgcaaatttctcaacaaaaacttgaaaagtcagtgagcttggtatggtatttttcatgctttttaaagacaacacttgccaattcagacaactatagccagaaaagccatctgttataattgaatgaaaaaggaaaacttcctttccgccgaccaatcagagactaggtgagtgaccccccctgcttttacccaactcctgtccaaagcgccattcacccagatccccccaggtttgtccctgcttgaaatagacacgcccaggcatggaaaagctccctgaatatgggtacaggccactattccttccgttcccggcgaccaatccgccaggaggtgagtgatccaccactcttacccaactccttatcaaagccccatccatcccgatctccccgggcctgctcctgcttggggtagacctacccaggcagtgaggaacccccagagcctggaaacaccccactcttcctgtcctgcccacacacacccgattcctatggaggcctaactccttcatagtgaggagactacgaggagaggcataaccatccagagcttaagacattgaattcctggcccacacatactactgtgtaacaagaggagatagagagaccctacctgcactcactggaaaaagatatgggaagaagacagaataagaactcgcttaataacagaaagaccaatatgacactaacagaatctagggactccactccagcaagacctgaaaagcccaacatagggcatgaagaagagatggacctcaaaaattatctcagcaagatgatagagaccttcaaagaggaaacaaaagaatctaaagaaacccaagataaaacaaccaaacaagtgaaggaagctcttgaaacagatcaaagcatgaaagttgaattggatacaataaagaaaacacagaatgaggcgatgctggaaatggaaagac
